(19) United States
(12) Patent Application Publication
(10) Pub. No.: US 2006/0099578 A1
(43) Pub. Date: May 11, 2006

(54) Mitochondrial biology expression arrays

(76) Inventors: Douglas C Wallace, Irvine, CA (US); Shawn Levy, Brentwood, TN (US); Keith Kerstann, Atlanta, GA (US); Vincent Procaccio, Irvine, CA (US)

Correspondence Address: GREENLEE WINNER AND SULLIVAN P C, 4875 PEARL EAST CIRCLE, SUITE 200, BOULDER, CO, 80301, US

(21) Appl. No.: 10/488,619

(22) PCT Filed: Aug. 30, 2002
(86) PCT No.: PCT/US02/27886

§ 371 Date: Nov. 9, 2004

(30) Foreign Application Priority Data
Aug. 30, 2001 (US) 60316323
Aug. 31, 2001 (CA) 2356540

(51) Int. Cl. C12Q 1/68; C12M 1/34

(52) U.S. Cl. 435/6; 435/287.2

(57) ABSTRACT

This invention provides a library of genes involved in mitochondrial biology, arrays containing probes for genes involved in mitochondrial biology, methods for making such arrays, and methods of using such arrays. Genes and probe sequences involved in mitochondrial biology in humans and mice are provided. The arrays of this invention are useful for determining mitochondrial biology gene expression profiles. Mitochondrial biology gene expression profiles are useful for determining expression profiles diagnostic of physiological conditions; diagnosing physiological conditions; identifying biochemical pathways, genes, and mutations involved in physiological conditions; identify therapeutic agents useful for preventing and/or treating such physiological conditions; evaluating and/or monitoring the efficacy of such therapies, and creating and identifying animal models of human physiologic conditions. Arrays containing probes for all genes known to be involved in mitochondrial biology are provided, as well as arrays containing subsets of such probes.

### CROSS-REFERENCE TO RELATED APPLICATIONS

[0001] This application claims priority to U.S. Patent Application Ser. No. 60/316,323 filed Aug. 30, 2001, and to Canadian Patent Application Serial No. 2,356,540 filed Aug. 31, 2001, both of which is hereby incorporated in their entirety by reference to the extent not inconsistent with the disclosure herein.

### BACKGROUND OF THE INVENTION

[0002] Mitochondrial disorders are a complex and polygenic group of conditions with the patient's symptoms varying due to differences in energetic threshold effect of various tissues and the stochastic nature of mtDNA segregation. Consequently, most mitochondrial disorders are best classified by their genetic cause rather than a biochemical or phenotypic profile (Shoffner, J. M., and Wallace, D. C., (1995) “Oxidative phosphorylation diseases,” In The Metabolic and Molecular Basis of Inherited Disease, C. R. Scriver, A. L. Beaudet, W. S. Sly and D. Valle, eds. (New York: McGraw-Hill), pp.1535-1609; Wallace, D. C., (1999) “Mitochondrial diseases in man and mouse” Science 283:1482-1488). Many mitochondrial diseases result from mutations in nuclear genes and a subset of these are known to act by destabilizing the mitochondrial genome. (Graham, B. et al., “A mouse model for mitochondrial myopathy and cardiomyopathy resulting from a deficiency in the heart/skeletal muscle isoform of the adenine nucleotide translocator,” [1997] Nature Genetics 16:226-234; Shoffner, J. M., and Wallace, D. C., “Oxidative phosphorylation diseases. Disorders of two genomes,” [1990] Advances in Human Genetics 19:267-330; Zhu, Z. et al., “SURF1, encoding a factor involved in the biogenesis of cytochrome c oxidase, is mutated in Leigh's syndrome” [1998] Nature Genetics 20:33743).

[0003] The analysis of mitochondrial function in cultured cells using somatic cell genetics has been instrumental in the characterization of human mitochondrial disorders. Ethidium bromide and R-6G treatment have been used to create ρ0 and mitochondria-less cell lines to analyze the maternal inheritance and biochemical phenotypes of many human mtDNA mutations (Chomyn, A. et al., “In vitro genetic transfer of protein synthesis and respiration defects to mitochondrial DNA-less cells with myopathy-patient mitochondria,” [1991] Molecular and Cellular Biology 11:2236-2244; Jun, A. S. et al., “Use of transrnitochondrial cybrids to assign a complex I defect to the mitochondrial DNA-encoded NADH dehydrogenase subunit 6 gene mutation at nucleotide pair 14459 that causes Leber hereditary optic neuropathy and dystonia,” [1996] Molecular and Cellular Biology 16:771-777; King, M. P. et al., “Defects in mitochondrial protein synthesis and respiratory chain activity segregate with the tRNA Leu(UUR) mutation associated with mitochondrial myopathy, encephalopathy, lactic acidosis, and stroke-like episodes,” [1992] Molecular and Cellular Biology 12:480490; Trounce, I. et al., “Cytoplasmic transfer of the mtDNA nt 8993 TG [ATP6] point mutation associated with Leigh's syndrome into mtDNA-less cells demonstrates cosegregation with a decrease in state III respiration and ADP/O ratio,” [1994] Proc. Natl. Acad. Sci. U.S.A. 91:8334-8338). The creation of cybrid cell lines with identical nuclear backgrounds but different mtDNA genotypes allows the comparison of one mtDNA mutant to another without the potential interference of nuclear genome polymorphisms. These cybrid lines have generally been analyzed using biochemical techniques such as assaying cellular respiration or respiratory complex specific activities by enzymology. Some gene expression studies have been performed, but they have generally been done on single or small groups of genes (Heddi, A. et al., “Mitochondrial DNA expression in mitochondrial myopathies and coordinated expression of nuclear genes involved in ATP,” [1993] J. Biological Chemistry 268:12156-12163; Heddi, A. et al., “Coordinate induction of energy gene expression in tissues of mitochondrial disease patients” [1999] J Biol Chem 274:22968-76).

[0004] Gene expression has been extensively studied. Although the regulation of mRNA abundance by changes in transcription or RNA degradation is by no means the only mechanism that regulates protein levels in a cell, virtually all differences in cell type or state can be correlated to changes in the mRNA abundance of several genes (Alizadeh, A. A. et al., “Distinct types of diffuse large B-cell lymphoma identified by gene expression profiling,” [2000] Nature 403:503-11; DeRisi, J. L. et al., “Exploring the metabolic and genetic control of gene expression on a genomic scale,” [1997] Science 278:680-686; Schena, M. et al., “Quantitative monitoring of gene expression patterns with a complementary DNA microarray” [1995] Science 270:467-70; Schena, M. et al., “Parallel human genome analysis: microarray-based expression monitoring of 1000 genes” [1996] Proc Natl Acad Sci USA 93:10614-9; Wallace D. C., grant abstract #2R01N502328-18; Kerstann, K. W. [2000] American Society for Human Genetics Abstract #1484; Kokoszka, J. E. [2000] American Society of Human Genetics Abstract #1618; Levy, S. E. [2001] American Society of Human Genetics Abstract #1501; Levy, S. E. [2000] “Genetic Alteration of the Mouse Mitochondrial Genome and Effects on Gene Expression,” Ph.D. Thesis, Emory University; Coskun, P. E. [2000] American Society of Human Genetics Abstract #1616; Sligh, J. E. [2000] American Society for Human Genetics Abstract #53; Murdock, D. G. [2000] American Society for Human Genetics Abstract #55; Levy S. E. [2000] Keystone Symposia Abstract 119; Wallace, D. C., Ellison Medical Foundation, Senior Scholar Award in Aging).

[0005] DNA microarray analysis has been used to study diffuse large B-cell lymphoma (DLBCL) where microarrays were used to expand the diagnosis of DLBCL (Alizadeh, A. A. et al., “Distinct types of diffuse large B-cell lymphoma identified by gene expression profiling,” [2000] Nature 403:503-11). While standard histological and morphological techniques had defined subsets of DLBCL, array analysis revealed two clinically distinct classes. These two newly discovered classes were indistinguishable by standard pathology, but expression analysis showed a differential expression of hundreds of genes. Correlation of these molecular differences with differences in the progression of the disease and clinical outcome has revealed that these two classes of DLBCL could be considered separate diseases (Alizadeh, A. A. et al., “Distinct types of diffuse large B-cell lymphoma identified by gene expression profiling,” [2000] Nature 403:503-11).

[0006] Mitochondrial DNA sequences have been associated with pathologies as described in U.S. Pat. Nos. 5,670,320, 5,296,349, 5,185,244, and 5,494,794. Publications on the subject of mitochondrial biology include: Scheffler I. E. (1999) Mitochondria, Wiley-Liss, New York; Lestienne, P., Ed. (1999) Mitochondrial Diseases: Models and Methods, Springer-Verlag, Berlin; Methods in Enzymology (2000) 322:Section V Mitochondria and Apoptosis, Academic Press, California; Mitochondria and Cell Death (1999) Princeton University Press, New Jersey; Papa S, Ferruciio G, and Tager J Eds. (1999) Frontiers of Cellular Biometics: Molecular Biology, Biochemistry, and Physiopathology, Kluwer Academic/Plenum Publishers, New York; Lemasters J and Nieminen A (2001) Mitochondria in Pathogenesis, Kluwer Academic/Plenum Publishers, New York; MITOMAP, http://www.gen.emory.edu/cgi-gin/MITOMAP; Wallace D. C. (2001) “A mitochondrial paradigm for degenerative diseases and aging,” Novartis Foundation Symposium 235:247-266; Wallace D C “Mitochondrial DNA in Aging and Disease” (August 1997) Scientific American 277:40-47; Wallace D. C. et al., “Mitochondrial biology, degenerative diseases and aging,” (1998) BioFactors 7:187-190; Heddi, A. et al., “Coordinate Induction of Energy Gene Expression in Tissues of Mitochondrial Disease Patients” (1999) JBC 274:22968-22976; Wallace, D. C. “Mitochondrial Diseases in Man and Mouse,” (1999) Science 283:1482-1488; Saraste, M. “Oxidative Phosphorylation at the fin de siecle” (1999) Science 283:1488-1493; Kokoszka et. al., “Increased mitochondrial oxidative stress in the Sod2 (+/−) mouse results in the age-related decline of mitochondrial function culminating in increased apoptosis,” (2001) PNAS 98:2278-2283; Wallace, D. C. (2001) Mental Retardation and Developmental Disabilities 7:158-166; Wallace D. C. (2001) Am. J Med. Gen. 106:71-93; and Wallace, D. C. (2001) EuroMit 5 Abstract.

[0007] The analysis of mitochondrial disorders has traditionally consisted of molecular and biochemical descriptions of the defect (Shoffner, J. M., and Wallace, D. C., (1995) “Oxidative phosphorylation diseases,” In The Metabolic and Molecular Basis of Inherited Disease, C. R. Scriver, A. L. Beaudet, W. S. Sly and D. Valle, eds. (New York: McGraw-Hill), pp. 1535-1609). Only a limited number of analyses of changes in oxidative phosphorylation (OXPHOS) genes expression have been performed in humans harboring mtDNA mutations (Heddi, A. et al., “Coordinate Induction of Energy Gene Expression in Tissues of Mitochondrial Disease Patients” (1999) JBC 274:22968-22976). The advent of mouse models for mitochondrial disease created by the inactivation of nuclear-encoded OXPHOS subunits has provided experimental material to study tissue-specific expression changes. (Murdock, D. G. et al., “Up-regulation of nuclear and mitochondrial genes in the skeletal muscle of mice lacking the heart/muscle isoform of the adenine nucleotide translocator,” [1999] J. Biol. Chem. 274:14429-33.)

[0008] Nucleic acid arrays have been described, e.g., in U.S. Pat. No. 5,837,832, U.S. Pat. No. 5,807,522, U.S. Pat. No. 6,007,987, U.S. Pat. No. 6,110,426, WO 99/05324, 99/05591, WO 00/58516, WO 95/11995, WO 95/35505A1, WO 99/42813, JP10503841T2, GR3030430T3, ES2134481T3, EP804731B1, DE69509925C0, CA2192095AA, AU2862995A1, AU709276B2, AT180570, EP 1066506, and AU 2780499. Such arrays can be incorporated into computerized methods for analyzing hybridization results when the arrays are contacted with prepared sample nucleotides, e.g., as described in PCT Publication WO 99/05574, and U.S. Pat. Nos. 5,754,524; 6,228,575; 5,593,839; and 5,856,101. Methods for screening for disease markers are also known to the art, e.g., as described in U.S. Pat. Nos. 6,228,586; 6,160,104; 6,083,698; 6,268,398; 6,228,578; and 6,265,174.

[0009] All references cited herein are incorporated by reference in their entirety to the extent that they are not inconsistent with the disclosure herein. Citation of the above documents is not an admission that any of them are pertinent prior art.

### SUMMARY OF THE INVENTION

[0010] This invention provides a library of genes involved in mitochondrial biology, arrays containing probes for genes involved in mitochondrial biology, methods for making such arrays, and methods of using such arrays. Genes and probe sequences involved in mitochondrial biology in humans and mice are provided. The arrays of this invention are useful for determining mitochondrial biology gene expression profiles. Mitochondrial biology gene expression profiles are useful for determining expression profiles diagnostic of energy metabolism-related physiological conditions; diagnosing such physiological conditions; identifying biochemical pathways, genes, and mutations involved in such physiological conditions; identifying therapeutic agents useful for preventing and/or treating such physiological conditions; evaluating and/or monitoring the efficacy of such therapies; and creating and identifying animal models of human energy metabolism-related physiological conditions. Arrays containing probes for all genes known to be involved in mitochondrial biology are provided, as well as arrays containing subsets of such probes. The mitochondrial biology expression arrays of this invention contain probes of genes not previously recognized to participate in mitochondrial biology.

### BRIEF DESCRIPTION OF THE DRAWINGS

[0011] FIG. 1 is a diagram of the mammalian mitochondrion showing mitochonrial energetics, and the relationship between energy production, reactive oxygen species (ROS) generation, and regulation of apoptosis.

[0012] FIG. 2 is a depiction of a hybridized mouse array of this invention. The picture of the hybridized array shows the image generated when the two channels representing the control or reference and experimental targets are overlaid. When viewed in color, the spots appear various shades of red, green and yellow. Red spots indicate a predominance of hybridization to control cDNAs, while green spots indicate the predominance of hybridization to the experimental target sample. Yellow spots indicate an equal hybridization of both samples. Spots that are yellow-green or orange when the array is shown in color are depicted as half yellow and green, or half red and yellow, respectively.

[0013] FIG. 3 shows the ρ0 LMEB4 cell line gene expression scatter plot. The scatter plot shows the distribution of gene expression ratio for the ρ0 LMEB4 sample. The diagonal dotted line indicates a ratio of 1 between the two samples. Any spot above the dotted line is up-regulated or more abundant in the ρ0 LMEB4 experimental sample compared to the LM(TK)-control. Any spot below the dotted line is down-regulated or less abundant in the experimental sample compared to the control.

[0014] FIG. 4 shows NZB heart gene expression scatter plot. The scatter plot shows the distribution of gene expression ratio for the NZB heart tissue sample. The diagonal dotted line indicates a ratio of 1 between the two samples. Any spot above the dotted line is up-regulated or more abundant in the NZB-mtDNA heart experimental sample compared to the “common” mtDNA control heart. Any spot below the dotted line is down-regulated or less abundant in the experimental sample compared to the control.

### DETAILED DESCRIPTION OF THE INVENTION

[0015] An approach to examining the complex interaction between nuclear and cytoplasmic mitochondrial genes is through the use of arrays such as DNA arrays. DNA microarrays provide a means to profile the expression patterns of up to thousands of genes simultaneously, and knowing where and when a gene is expressed often provides insight into its biological function. The pattern of gene expression in a particular tissue or cell type can also provide detailed information about its state or condition.

[0016] Currently, DNA microarrays are the most efficient method to monitor correlative changes in gene expression and to investigate complex traits on a molecular level. Expression profiles assembled from multiple interrelated experiments are used to determine hierarchical connections between gene expression patterns underlying complex biological traits. These patterns are used to further define the molecular basis of complex disorders.

[0017] The mitochondrion is assembled from approximately 1000 protein-coding nuclear DNA (nDNA) and mitochondrial DNA (mtDNA) genes. Thirteen protein-coding mitochondrial genes are known, as shown in Table 1. The codon usage table of the mtDNA is known. It differs slightly from the universal code. For example, UGA codes for tryptophan instead of termination, AUA codes for methionine instead of isoleucine, and AGA and AGG are terminators instead of coding for arginine.

TABLE 1

| Gene | Map Locus^{a} | Abbreviation | Location^{b} |
|---|---|---|---|
| NADH dehydrogenase 1 | MTND1 | ND1 | 3307-4262 |
| NADH dehydrogenase 2 | MTND2 | ND2 | 4470-5511 |
| NADH dehydrogenase 3 | MTND3 | ND3 | 10059-10404 |
| NADH dehydrogenase 4L | MTND4L | ND4L | 10470-10766 |
| NADH dehydrogenase 4 | MTND4 | ND4 | 10760-12137 |
| NADH dehydrogenase 5 | MTND5 | ND5 | 12337-14148 |
| NADH dehydrogenase 6 | MTND6 | ND6 | 14149-14673 |
| Cytochrome b | MTCYB | Cytb | 14747-15887 |
| Cytochrome c oxidase I | MTCO1 | COI | 5904-7445 |
| Cytochrome c oxidase II | MTCO2 | COII | 7586-8269 |
| Cytochrome c oxidase III | MTCO3 | COIII | 9207-9990 |
| ATP synthase 6 | MTATP6 | ATP6 | 8527-9207 |
| ATP synthase 8 | MTATP8 | ATP8 | 8366-8572 |

^{a,b}As defined on MitoMap, http://www.gen.emory.edu/cgi-bin/MITOMAP, which is numbered relative to the Cambridge Sequence (Genbank accession no. J01415 and Andrews et al. (1999), A Reanalysis and Revision of the Cambridge Reference Sequence for Human Mitochondrial DNA, Nature Genetics 23: 147.

[0018] As used herein “gene” refers to a unigene cluster, an expressed sequence, or a sequence that is transcribed and translated into a protein. Another word used in the art for “gene” is “locus.” The National Institutes of Health (NIH) have instituted the term “gene cluster” to refer to non-redundant sets of gene clusters. A stretch of DNA may be transcribed into several splice variants that share sequences, and these would be designated as belonging to one unigene cluster. As used herein “splice variant” refers to one version of several transcripts that are transcribed from one gene. As used herein “housekeeping gene” refers to a gene that is expressed at a similar level in almost all cell types.

[0019] As used herein “genes involved in mitochondrial biology” refers to mitochondrial genes and nuclear genes involved in cellular structures and functions such as intermediary metabolism, OXPHOS, mitochondrial transport, cellular bioenergetics, cellular biogenesis, cell cycle control, DNA replication, energy, metabolism, heat shock, stress, cellular matrix, cellular structural proteins, protein synthesis and translational control, signal transduction, transcription and transcriptional regulation, chromatin structure, reactive bxygen species (ROS) biology, and apoptosis.

[0020] “mtDNA” means mitochondrial DNA. “nDNA” means nuclear DNA.

[0021] As used herein “mitochondrial biology expression profile” refers to the expression patterns of genes involved in mitochondrial biology, such as is detected by probes derived from those genes, in a sample. The profile can be said to be of the sample or of the source from which the sample is derived. A profile may be measured independently, but a profile may also measured relative to a standard or control or other sample. A complete mitochondrial biology expression profile includes data on all genes known to be involved in mitochondrial biology for the species from which the sample is derived. The mitochondrial biology expression profile for a selected physiological condition is at least the expression pattern of genes determined to have altered expression diagnostic of that physiological condition, but the expression pattern of additional genes involved in mitochondrial biology may also be included.

[0022] As used herein “array” refers to an ordered set of isolated nucleic acid molecules or spots consisting of pluralities of substantially identical isolated nucleic acid molecules. Preferably the molecules are attached to a substrate. The spots or molecules are ordered so that the location of each (on the substrate) is known and the identity of each is known. Arrays on a micro scale can be called microarrays. Microarrays on solid substrates, such as glass or other ceramic slides, can be called gene chips or chips.

[0023] As used herein, an “isolated nucleic acid” is a nucleic acid outside of the context in which it is found in nature. An isolated nucleic acid is a nucleic acid the structure of which is not identical to that of any naturally occurring nucleic acid molecule. The term covers, for example: (a) a DNA which has the sequence of part of a naturally-occurring genomic DNA molecule but is not flanked by both of the coding or noncoding sequences that flank that part of the molecule in the genome of the organism in which it naturally occurs; (b) a nucleic acid incorporated into a vector or into the genomic DNA of a prokaryote or eukaryote in a manner such that the resulting molecule is not identical to any naturally-occurring vector or genomic DNA; (c) a separate molecule such as a cDNA, a genomic fragment, a fragment produced by polymerase chain reaction (PCR), or a restriction fragment; and (d) a recombinant nucleotide sequence that is part of a hybrid gene, i.e., a gene encoding a fusion protein, or a modified gene having a sequence not found in nature.

[0024] As used herein “probe” refers to an isolated nucleic acid that is suitable for hybridizing to other nucleic acids when placed on a solid substrate. Probes for arrays can be as short as 20-30 nucleotides and up to as long as several thousand nucleotides. Probes can be single-stranded or double stranded. A probe usually comprises at least a partially known sequence that is used to investigate or interrogate the presence, absence, and/or amount of a complementing sequence. On the arrays of this invention, a probe is of such a sequence and the hybridization conditions of such stringency that each probe hybridizes substantially to only one type of nucleic acid per target sample.

[0025] As used herein, “target” or “target sample” refers to the collection of nucleic acids, e.g., reverse transcribed and labeled cDNA used as a prepared sample for array analysis. The target is interrogated by the probes of the array. A “target” or “target sample” may be a mixture of several prepared samples that are combined. For example, an experimental target sample may be combined with a differently labeled control sample and hybridized to an array, the combined samples being referred to as the “target” interrogated by the probes of the array. As used herein, “interrogated” means tested. Probes, targets, and hybridization conditions are chosen such that the probes are capable of interrogating the target, i.e., of hybridizing to complementary sequences in the target sample.

[0026] As used herein “physiological condition” refers to a healthy or unhealthy physiological state. As used herein “optimize an array for diagnosis” refers to selecting probes for an array such that only probes from genes necessary for diagnosis of one or more physiological conditions are included.

[0027] As used herein “printing” refers to the process of applying probes to a solid substrate, e.g., or applying arrays of probes to a solid substrate to make a gene chip. As used herein “glass slide” refers to a small piece of glass of the same dimensions as a standard microscope slide. As used herein, “prepared substrate” refers to a substrate that is prepared with a substance capable of serving as an attachment medium for attaching the probes to the substrate, such as poly Lysine.

[0028] As used herein “selective hybridization” refers to hybridization at moderate to high stringency such that only sequences of an appropriate homology can remain bound. Selective hybridization is hybridization performed at stringency conditions such that probes only hybridize to target sample nucleic acids that they are intended to hybridize with. Depending on the sequences of the probes and the target, the hybridization conditions are chosen to be appropriately selective. For example, if human sequences are used as probes for interrogating a human sample, selective hybridization could be at high stringency because, allowing for neutral polymorphism in humans, the sequences would be about 99-100% identical. When applying a chimpanzee target prepared sample to an array containing human sequence probes, selective hybridization would be at a lower stringency. Since hybridizing a target to an array is performed at one chosen hybridization stringency, probes are chosen so that they can undergo selective hybridization with the appropriate target molecules at the same hybridization stringency. As used herein “homology” refers to nucleotide sequence identity to a sequence, a molecule, or its complement.

[0029] As used herein “mouse sample” refers to a sample derived from a mouse or a cell line derived from a mouse. Similarly, as used herein, “human sample” refers to a sample derived from a human or a cell line derived from a human. Samples preferably contain total RNA or messenger RNA (mRNA). As used herein “total RNA” refers to a combination of several types of RNA, including MRNA, from a cell or a group of cell. As used herein, “MRNA” refers to messenger RNA or RNA that has a 3′ poly A tail. As used herein, a “prepared sample” or a “target” refers to a sample that has been labeled in preparation for array hybridization. A “prepared sample” or “target” is reverse transcribed and fluorescently labeled. As used herein “standard” refers to a sample or a dataset that is commonly used for comparison to unknown samples so that the unknown samples or datasets can be standardized for comparison to each other. As used herein, “control sample” and “reference sample” refer to samples that are used for comparison against an experimental sample.

[0030] As used herein, “clone” refers to an isolated nucleic acid molecule that may be stored in an organism such as E. coli. A clone is usually made of a vector and an insert. The insert usually contains a sequence of interest.

[0031] For mitochondrial diseases, the accuracy of current biochemical and phenotypic techniques has proven quite limited in distinguishing and diagnosing the various disorders. Recent technical and analytical advancements make it practical to analyze and quantitate the expression patterns of thousands of genes at once using arrays such as DNA microarrays. This invention applies these array techniques to the study of mitochondrial gene expression, in the design of specialized microarrays containing genes involved in mitochondrial biology. The arrays of this invention contain probes for genes not previously recognized to participate in mitochondrial biology.

[0032] Genes, or expressed sequences, involved in mitochondrial biology are involved in cellular structures and functions such as intermediary metabolism, OXPHOS, transport, cellular bioenergetics, cellular biogenesis, cell cycle control, DNA replication, energy, metabolism, heat shock, stress, cellular matrix, cellular structural proteins, protein synthesis and translational control, signal transduction, transcription and transcriptional regulation, chromatin structure, reactive oxygen species (ROS) biology and apoptosis. Alterations in mitochondrial functions are associated with a variety of physiological conditions including degenerative diseases. These functions are involved in many degenerative diseases. This invention provides a compilation of sequences involved in human and mouse mitochondrial biology.

[0033] The genes in the arrays of this invention were identified by a variety of techniques including searching databanks for sequences related to genes involved in processes similar to mitochondrial biology such as homologues of prokaryotic genes, and screening mitochondrial mutant cell lines and animal lines for genes having altered expression patterns. When a relevant gene was identified for one species, such as the mouse, the homologue for a second species, such as human, if known, was then included on the list of genes involved in mitochondrial biology for the second species. Mitochondrial mutant cell lines are cell lines that have at least one mutation in a gene involved in mitochondrial biology.

[0034] The microarrays or gene chips of this invention comprise probes placed in known positions on a solid substrate. A useful solid substrate is a specialized glass microscope slide. The arrays of this invention include arrays containing probes that detect some or all expressed sequences involved in mitochondrial biology in a selected species.

[0035] Arrays of this invention may contain control probes as well as probes for genes involved in mitochondrial biology. Controls that can be included on the arrays of this invention include hybridization controls and scanning controls. The controls can be positive or negative controls. One type of hybridization control is spotting the same probe for a gene involved in mitochondrial biology several times on one chip, each spot having different amounts of probe. This allows for the amount of probe of a given sequence to be optimized. Spotting too little probe may lead to a maximum hybridization signal resulting in a loss of data. Dimethyl sulfoxide (DMSO) can be used as a negative hybridization and scanning control. A spot of DMSO should give no signal. If there is any signal at a DMSO spot, the problem could be at hybridization or scanning steps. Plant sequences having sufficiently low homology with human and mouse sequences can be utilized as negative hybridization and scanning controls. Plant sequences should not give any signal. A signal at a plant spot could indicate a problem with hybridization, i.e. too low a hybridization stringency was used, or with scanning, i.e., the chip was inserted into the scanner at the incorrect orientation. Poly A can be used as a positive hybridization specificity/non specificity control. A poly A spot should always give intense hybridization. No signal at a poly A spot could be the result of use of too high a hybridization stringency. Cy3 or Cy5 incorporated into a PCR product can be a positive scanning control. A spot on an array of a PCR product, or any other nucleic acid, that includes fluorescent label, should always give a signal, and if this sequence has no homology with any other sequence in the target, there should only be a signal of the label included in the nucleic acid. Control probes and probes for genes involved in mitochondrial biology can be duplicated, triplicated, etc. on the chip as printing controls. Controls for arrays can be purchased from Stratagene (SpotReport™, La Jolla, Calif., USA).

[0036] Standard targets and reference targets are also useful with the arrays of this invention, as is known in the art. When a prepared sample target to be interrogated is applied to an array of this invention, the results of the test are measured, i.e. by scanning, and recorded. These results can be compared directly to other test results using a similar array. However, it is much more accurate to include a differently labeled standard target in the hybridization mix with the prepared sample target. The results of the experimental sample target are then standardized, so that they can be compared accurately to the results of hybridizations of other sample targets. If ten different prepared sample targets are hybridized to arrays of this invention, simultaneously with the same prepared standard target, then the results of the ten sample targets can be accurately compared to each other. A prepared reference or control target for comparison can also be particularly pertinent to the experiment being performed. A prepared reference target could be a target sample derived from the same cell type from an animal of the same sex, age, and nuclear background as the experimental target sample, except for one difference, such as a different phenotype or treatment. Comparing the results of the experimental target with the results of an appropriate reference target yields a profile associated with the one difference being tested. When the hybridization results of a first sample are compared to the hybridization results of a second sample, the comparison can occur while the hybridization results of the first sample are being measured and recorded, or afterwards, by comparing the measured and recorded hybridization results of the two samples.

[0037] Probes on an array may be as short as about 20-30 nucleotides long or as long as the entire gene or clone from which they are derived, which may be up to several kilobases. A probe sequence may be identical (have 100% homology) to the portion of the gene it hybridizes to or it may be a mutated sequence. Mutated probes have less than 100% homology, such as about 98% homology, about 95% homology, about 90% homology, about 80% homology, or about 75% homology, or less, with the portions of the genes to which they hybridize. Arrays are designed such that all probes on an array can hybridize to their corresponding genes at about the same hybridization stringency. Probes for arrays used for interrogating samples usually do not contain sequences such as repetitive sequences that would hybridize substantially with nucleic acids derived from more than one gene, i.e., transcripts or cDNAs. Probes for arrays should be unique at the hybridization stringencies used. Statistically, to be unique in the total human genome, probes should be at least about fifteen nucleotides long. A unique probe is only able to hybridize with one type of nucleic acid per target. A probe is not unique if at the hybridization stringency used, it hybridizes with nucleic acids derived from two different genes, i.e. related genes. The homology of the sequence of the probe to the gene and the hybridization stringency used help determine whether a probe is unique when testing a selected sample. Probes also may not hybridize with different nucleic acids derived from the same gene, i.e., splice variants. The location in the gene of the sequence used for the probe also helps determines whether a probe is unique when testing a selected sample. If the splice variants of a gene are known, ideally several different probes sequences are chosen from that gene for an array, such that each probe can only hybridize to nucleic acid derived from one of the splice variants. References for sequences of probes useful for arrays of this invention are compiled in Tables 3-5 and in the sequence listings. Other equivalent probes derived from the gene sequences from which the Tables 3-5 probes are derived, are also useful for the arrays of this invention. Arrays of this invention are used at hybridization conditions allowing for selective hybridization. At conditions of selective hybridization, probes hybridize with nucleic acid from only one gene. When an array is simultaneously hybridized with two targets or two prepared samples, each probe may hybridize with a nucleic acid in each prepared sample or target. When these two nucleic acids are from the same unigene cluster, the probe is said to hybridize with one gene, despite the fact that these nucleic acids may contain different labels.

[0038] Sequences of genes involved in mitochondrial biology from other species can be used to make probes that are useful in the arrays of this invention as long as they hybridize at about the same hybridization stringency as other probes on an array. Sequences that are only able to hybridize at a substantially lower stringency, such as plant sequences, are useful as negative controls.

[0039] The arrays of this invention can be utilized to determine profiles for related species by modifying the hybridization stringency appropriately. Sequence homology between organisms is known in the art. For example, human and chimpanzee sequences are about 98% identical. Consequently, human arrays are useful for profiling chimpanzees, with an appropriate lowering of the hybridization stringency. Hybridization stringency can be lowered by modifying hybridization components such as salt concentrations and hybridization and/or wash temperatures, as is known in the art.

[0040] The sequences useful for the arrays of this invention are useful for designing arrays for other species as well. To create an array for a new organism, the known sequences from the new organism, including expressed sequence tags (ESTs), are compared, by methods known to the art, with the sequences known to already be useful for other mitochondrial biology arrays. Sequence comparisons may be performed at the nucleic acid or polypeptide level. Homologous and analogous sequences from the new organism are thereby identified and selected for the new organism's mitochondrial array. The probes on the arrays of this invention are also useful as probes for identifying candidates for the new organism's array using molecular biology techniques that are standard in the art such as screening libraries.

[0041] All sequences given herein are meant to encompass the complementary strand, as well as double-stranded polynucleotides comprising the given sequence.

[0042] Microarrays of this invention can contain as few as two probes to as many as all the probes diagnostic of the selected physiological condition to be tested. Microarrays of this invention may also contain probes for all genes involved in mitochondrial biology. The arrays of this invention may contain probes for at least about five genes, at least about ten genes, at least about twenty-five genes, at least about fifty genes, at least about 100 genes, at least about 500 genes, or at least about 1000 genes. The mouse array may contain probes for at least about 950 genes and the human array may contain probes for at least about 600 genes. Arrays of this invention may comprise more than about five spots, more than about ten spots, more than about twenty-five spots, more than about one hundred spots, more than about 500 spots, or more than about 1000 spots.

[0043] Using microarrays may require amplification of target sequences (generation of multiple copies of the same sequence) of sequences of interest, such as by PCR or reverse transcription. As the nucleic acid is copied, it is tagged with a fluorescent label that emits light like a light bulb. The labeled nucleic acid is introduced to the microarray and allowed to react for a period of time. This nucleic acid sticks to, or hybridizes, with the probes on the array when the probe is sufficiently complementary to the labeled, amplified, sample nucleic acid. The extra nucleic acid is washed off of the array, leaving behind only the nucleic acid that has bound to the probes. By obtaining an image of the array with a fluorescent scanner and using software to analyze the hybridized array image, it can be determined if, and to what extent, genes are switched on and off, or whether or not sequences are present, by comparing fluorescent intensities at specific locations on the array. The intensity of the signal indicates to what extent a sequence is present. In expression arrays, high fluorescent signals indicate that many copies of a gene are present in a sample, and lower fluorescent signal shows a gene is less active. By selecting appropriate hybridization conditions and probes, this technique is useful for detecting single nucleotide polymorphisms (SNPs) and for sequencing. Methods of designing and using microarrays are continuously being improved (Relogio, A. et al. (2002) Nuc. Acids. Res. 30(1 l):e51; Iwasaki, H et al. (2002) DNA Res. 9(2):59-62; and Lindroos, K. et al. (2002) Nuc. Acids. Res. 30(14):E70).

[0044] Arrays of this invention may be made by any array synthesis methods known in the art such as spotting technology or solid phase synthesis. Preferably the arrays of this invention are synthesized by solid phase synthesis using a combination of photolithography and combinatorial chemistry. Some of the key elements of probe selection and array design are common to the production of all arrays. Strategies to optimize probe hybridization, for example, are invariably included in the process of probe selection. Hybridization under particular pH, salt, and temperature conditions can be optimized by taking into account melting temperatures and by using empirical rules that correlate with desired hybridization behaviors. Computer models may be used for predicting the intensity and concentration-dependence of probe hybridization.

[0045] Arrays, also called DNA microarrays or DNA chips, are fabricated by high-speed robotics, generally on glass but sometimes on nylon substrates, for which probes (Phimister, B. (1999) Nature Genetics 21s: 1-60) with known identity are used to determine complementary binding. An experiment with a single DNA chip can provide researchers information on thousands of genes simultaneously. There are several steps in the design and implementation of a DNA array experiment. Many strategies have been investigated at each of these steps: 1) DNA types; 2) Chip fabrication; 3) Sample preparation; 4) Assay; 5) Readout; and 6) Software (informatics).

[0046] There are two major application forms for the array technology: 1) Determination of expression level (abundance) of genes; and 2) Identification of sequence (gene/gene mutation). There appear to be two variants of the array technology, in terms of intellectual property, of arrayed DNA sequence with known identity: Format I consists of probe cDNA (500˜5,000 bases long) immobilized to a solid surface such as glass using robot spotting and exposed to a set of targets either separately or in a mixture. This method, “traditionally” called DNA microarray, is widely considered as having been developed at Stanford University. (R. Ekins and F. W. Chu “Microarrays: their origins and applications,” [1999] Trends in Biotechnology, 17:217-218). Format II consists of an array of oligonucleotide (20˜80-mer oligos) or peptide nucleic acid (PNA) probes synthesized either in situ (on-chip) or by conventional synthesis followed by on-chip immobilization. The array is exposed to labeled sample DNA, hybridized, and the identity/abundance of complementary sequences is determined. This method, “historically” called DNA chips, was developed at Affymetrix, Inc., which sells its photolithographically fabricated products under the GeneChip® trademark. Many companies are manufacturing oligonucleotide-based chips using alternative in-situ synthesis or depositioning technologies.

[0047] Probes on arrays can be hybridized with fluorescently-labeled target polynucleotides and the hybridized array can be scanned by means of scanning fluorescence microscopy. The fluorescence patterns are then analyzed by an algorithm that determines the extent of mismatch content, identifies polymorphisms, and provides some general sequencing information (M. Chee et al., [1996] Science 274:610). Selectivity is afforded in this system by low stringency washes to rinse away non-selectively adsorbed materials. Subsequent analysis of relative binding signals from array elements determines where base-pair mismatches may exist. This method then relies on conventional chemical methods to maximize stringency, and automated pattern recognition processing is used to discriminate between fully complementary and partially complementary binding.

[0048] Devices such as standard nucleic acid microarrays or gene chips, require data processing algorithms and the use of sample redundancy (i.e., many of the same types of array elements for statistically significant data interpretation and avoidance of anomalies) to provide semi-quantitative analysis of polymorphisms or levels of mismatch between the target sequence and sequences immobilized on the device surface. Such algorithms and software useful for statistical analysis are known to the art.

[0049] Using microarrays first requires amplification (generation of multiple copies of the same gene) of genes of interest, such as by reverse transcription. As the nucleic acid is copied, it is tagged with a fluorescent label that emits light like a light bulb. The labeled nucleic acid is introduced to the microarray and allowed to react for a period of time. This nucleic acid sticks to, or hybridizes, with the probes on the array when the probe is sufficiently complementary to the nucleic acid in the prepared sample. The extra nucleic acid is washed off of the array, leaving behind only the nucleic acid that has bound to the probes. By obtaining an image of the array with a fluorescent scanner and using software to analyze the hybridized array image, it can be determined if and to what extent genes are switched on and off, or whether or not sequences are present, by comparing fluorescent intensities at specific locations on the array. High fluorescent signals indicate that many copies of a gene are present in a prepared sample, and lower fluorescent signal shows a gene is less active. Expression levels for various genes under different conditions can be directly compared, such as for a cancer cell and a normal cell. Similarly, it can be determined what genes are turned on and off in response to certain stimuli such as a drug. Such information is valuable because it identifies genes in disease pathways and also is predictive of either efficacy or toxicity of drugs.

[0050] Detecting a particular polymorphism can be accomplished using two probes. One probe is designed to be perfectly complementary to a target sequence, and a partner probe is generated that is identical except for a single base mismatch in its center. In the Affymetrix system, these probe pairs are called the Perfect Match probe (PM) and the Mismatch probe (MM. They allow for the quantitation and subtraction of signals caused by non-specific cross-hybridization. The difference in hybridization signals between the partners, as well as their intensity ratios, serve as indicators of specific target abundance, and consequently of the sequence.

[0051] Arrays can rely on multiple probes to interrogate individual nucleotides in a sequence. The identity of a target base can be deduced using four identical probes that vary only in the target position, each containing one of the four possible bases. Alternatively, the presence of a consensus sequence can be tested using one or two probes representing specific alleles. To genotype heterozygous or genetically mixed samples, arrays with many probes can be created to provide redundant information, resulting in unequivocal genotyping.

[0052] Probes fixed on solid substrates and targets (nucleotide sequences in the sample) are combined in a hybridization buffer solution and held at an appropriate temperature until annealing occurs. Thereafter, the substrate is washed free of extraneous materials, leaving the nucleic acids on the target bound to the fixed probe molecules allowing for detection and quantitation by methods known in the art such as by autoradiograph, liquid scintillation counting, and/or fluorescence. As improvements are made in hybridization and detection techniques, they can be readily applied by one of ordinary skill in the art. As is well known in the art, if the probe molecules and target molecules hybridize by forming a strong non-covalent bond between the two molecules, it can be reasonably assumed that the probe and target nucleic acid are essentially identical, or almost completely complementary if the annealing and washing steps are carried out under conditions of high stringency. The detectable label provides a means for determining whether hybridization has occurred.

[0053] When using oligonucleotides or polynucleotides as hybridization probes, the probes may be labeled. In arrays of this invention, the target may instead be labeled by means known to the art. Target may be labeled with radioactive or non-radioactive labels. Targets preferably contain fluorescent labels.

[0054] Various degrees of stringency of hybridization can be employed. The more stringent the conditions are, the greater the complementarity that is required for duplex formation. Stringency can be controlled by temperature, probe concentration, probe length, ionic strength, time, and the like. Hybridization experiments are often conducted under moderate to high stringency conditions by techniques well know in the art, as described, for example in Keller, G. H., and M. M. Manak (1987) DNA Probes, Stockton Press, New York, N.Y., pp. 169-170, hereby incorporated by reference. However, sequencing arrays typically use lower hybridization stringencies, as is known in the art.

[0055] Moderate to high stringency conditions for hybridization are known to the art. An example of high stringency conditions for a blot are hybridizing at 68° C. in 5×SSC/5× Denhardt's solution/0.1% SDS, and washing in 0.2×SSC/0.1% SDS at room temperature. An example of conditions of moderate stringency are hybridizing at 680 C in 5×SSC/5× Denhardt's solution/0.1% SDS and washing at 42° C. in 3×SSC. The parameters of temperature and salt concentration can be varied to achieve the desired level of sequence identity between probe and target nucleic acid. See, e.g., Sambrook et al. (1989) vide infra or Ausubel et al. (1995) Current Protocols in Molecular Biology, John Wiley & Sons, New York, N.Y., for further guidance on hybridization conditions.

[0056] The melting temperature is described by the following formula (Beltz, G. A. et al., [1983] Methods of Enzymology, R. Wu, L. Grossman and K. Moldave [Eds.] Academic Press, New York 100:266-285).
[0057] Tm=81.5o C+16.6 Log[Na+]+0.41(+G+C)−0.61(% formamide)−600/length of duplex in base pairs.

[0058] Washes can typically be carried out as follows: twice at room temperature for 15 minutes in I×SSPE, 0.1% SDS (low stringency wash), and once at TM-20o C for 15 minutes in 0.2×SSPE, 0.1% SDS (moderate stringency wash).

[0059] Nucleic acid useful in this invention can be created by Polymerase Chain Reaction (PCR) amplification. PCR products can be confirmed by agarose gel electrophoresis. PCR is a repetitive, enzymatic, primed synthesis of a nucleic acid sequence. This procedure is well known and commonly used by those skilled in this art (see Mullis, U.S. Pat. Nos. 4,683,195, 4,683,202, and 4,800,159; Saiki et al. [1985] Science 230:1350-1354). PCR is used to enzymatically amplify a DNA fragment of interest that is flanked by two oligonucleotide primers that hybridize to opposite strands of the target sequence. The primers are oriented with the 3′ ends pointing towards each other. Repeated cycles of heat denaturation of the template, annealing of the primers to their complementary sequences, and extension of the annealed primers with a DNA polymerase result in the amplification of the segment defined by the 5′ ends of the PCR primers. Since the extension product of each primer can serve as a template for the other primer, each cycle essentially doubles the amount of DNA template produced in the previous cycle. This results in the exponential accumulation of the specific target fragment, up to several million-fold in a few hours. By using a thermostable DNA polymerase such as the Taq polymerase, which is isolated from the thermophilic bacterium Thermus aquaticus, the amplification process can be completely automated. Other enzymes that can be used are known to those skilled in the art.

[0060] Polynucleotide sequences of the present invention can be truncated and/or mutated such that certain of the resulting fragments and/or mutants of the original full-length sequence can retain the desired characteristics of the full-length sequence. A wide variety of restriction enzymes that are suitable for generating fragments from larger nucleic acid molecules are well known. In addition, it is well known that Bal31 exonuclease can be conveniently used for time-controlled limited digestion of DNA. See, for example, Maniatis (1982) Molecular Cloning: A Laboratory Manual, Cold Spring Harbor Laboratory, New York, pages 135-139, incorporated herein by reference. See also Wei et al. (1983) J. Biol. Chem. 258:13006-13512. By use of Bal3l exonuclease (commonly referred to as “erase-a-base” procedures), the ordinarily skilled artisan can remove nucleotides from either or both ends of the subject nucleic acids to generate a wide spectrum of fragments that are functionally equivalent to the subject nucleotide sequences. One of ordinary skill in the art can, in this manner, generate hundreds of fragments of controlled, varying lengths from locations all along the original molecule. The ordinarily skilled artisan can routinely test or screen the generated fragments for their characteristics and determine the utility of the fragments as taught herein. It is also well known that the mutant sequences can be easily produced with site-directed mutagenesis. See, for example, Larionov, O. A. and Nikiforov, V. G. (1982) Genetika 18(3):349-59; and Shortle, D. et al., (1981) Annu. Rev. Genet. 15:265-94, both incorporated herein by reference. The skilled artisan can routinely produce deletion-, insertion-, or substitution-type mutations and identify those resulting mutants that contain the desired characteristics of wild-type sequences, or fragments thereof.

[0061] Thus, mutational, insertional, and deletional variants of the disclosed nucleotide sequences can be readily prepared by methods which are well known to those skilled in the art. These variants can be used in the same manner as the exemplified primer sequences so long as the variants have substantial sequence homology with the original sequence. As used herein, substantial sequence homology refers to homology that is sufficient to enable the variant polynucleotide to function in the same capacity as the polynucleotide from which the probe was derived. Homology is greater than 80%, greater than 85%, greater than 90%, or greater than 95%. The degree of homology or identity needed for the variant to fimction in its intended capacity depends upon the intended use of the sequence. It is well within the skill of a person trained in this art to make mutational, insertional, and deletional mutations that are equivalent in function or are designed to improve the function of the sequence or otherwise provide a methodological advantage.

[0062] Percent sequence identity of two nucleic acids may be determined using the algorithm of Karlin and Altschul (1990) Proc. Natl. Acad. Sci. USA 87:2264-2268, modified as in Karlin and Altschul (1993) Proc. Natl. Acad. Sci. USA 90:5873-5877. Such an algorithm is incorporated into the NBLAST and XBLAST programs of Altschul et al. (1990) J. Mol. Biol. 215:402-410. BLAST nucleotide searches are performed with the NBLAST program, score=100, wordlength=12, to obtain nucleotide sequences with the desired percent sequence identity. To obtain gapped alignments for comparison purposes, Gapped BLAST is used as described in Altschul et al. (1997) Nucl. Acids. Res. 25:3389-3402. When utilizing BLAST and Gapped BLAST programs, the default parameters of the respective programs (NBLAST and XBLAST) are used. See http://www.ncbi.nih.gov.

[0063] Standard techniques for cloning, DNA isolation, amplification and purification, for enzymatic reactions involving DNA ligase, DNA polymerase, restriction endonucleases and the like, and various separation techniques useful herein are those known and commonly employed by those skilled in the art. A number of standard techniques are described in Sambrook et al. (1989) Molecular Cloning, Second Edition, Cold Spring Harbor Laboratory, Plainview, New York; Maniatis et al. (1982) Molecular Cloning, Cold Spring Harbor Laboratory, Plainview, New York; Wu (ed.) (1993) Meth. Enzymol. 218, Part I; Wu (ed.) (1979) Meth. Enzymol. 68; Wu et al. (eds.) (1983) Meth. Enzymol. 100 and 101; Grossman and Moldave (eds.) Meth. Enzymol. 65; Miller (ed.) (1972) Experiments in Molecular Genetics, Cold Spring Harbor Laboratory, Cold Spring Harbor, New York; Old and Primrose (1981) Principles of Gene Manipulation, University of California Press, Berkeley; Schleif and Wensink (1982) Practical Methods in Molecular Biology; Glover (Ed.) (1985) DNA Cloning Vol. I and II, IRL Press, Oxford, UK; Hames and Higgins (Eds.) (1985) Nucleic Acid Hybridization, IRL Press, Oxford, UK; Setlow and Hollaender (1979) Genetic Engineering: Principles and Methods, Vols. 14, Plenum Press, New York; and Ausubel et al. (1992) Current Protocols in Molecular Biology, Greene/Wiley, New York, N.Y. Abbreviations and nomenclature, where employed, are deemed standard in the field and commonly used in professional journals such as those cited herein.

[0064] The arrays of this invention are useful for defining expression signatures or profiles for mitochondrial diseases, as well as distinguishing clinical disorders that result from OXPHOS dysfunction, oxidative stress, apoptosis, and aging. The microarrays of this invention are useful for providing profiles for whole classes of mitochondrial diseases that have common underlying pathophysiological mechanisms. The data obtained from using these arrays are useful in the identification of pathways involved in these diseases and in the design of efficient therapies for treating these diseases.

[0065] The arrays of this invention are useful for determining mitochondrial biology expression profiles and for sample evaluation using those profiles. The arrays of this invention are useful for diagnosis, for identifying pathways, genes, and mutations involved in physiological conditions, for creating animal models of human physiological conditions, and for designing curative and preventative therapies and evaluating their effectiveness.

[0066] The arrays of this invention are useful for determining mitochondrial biology expression profiles of organisms, such as humans, mice, and closely related species; tissues and organs of such organisms; cell types of such organisms; and cell lines derived from such organisms. An individual can be tested at any age, including as a fetus, neonate, infant, child, adolescent, mature adult, senior, and deceased. Using standard targets, the arrays of this invention are useful for comparing mitochondrial biology profiles of different individuals or cells.

[0067] The arrays of this invention are useful for determining the profile associated with a physiological condition such as an energy-metabolism-related physiological condition. Physiological conditions can be healthy conditions or pathological conditions. Examples of healthy conditions in humans are centenaria and physical fitness. An example of a pathological condition in humans is Leigh's syndrome (LS). By determining profiles from individuals, with and without such physiological conditions, and comparing them, the mitochondrial biology profile representative and descriptive of the physiological condition can be determined, such as for humans in Examples 4-5. Profiles can similarly be determined for cells lines with phenotypes or genotypes associated with physiological conditions, such as in Examples 13-15. Profiles can also be determined for non-human animals, including mouse strains, with physiological conditions as in Examples 8-12, 16, and 19. The arrays of this invention are useful for determining the range of normal variation of expression of genes involved in mitochondrial biology, as in Example 20. When the arrays of this invention are used to determine a profile associated with a physiological condition, prepared target samples or pooled prepared target samples, of individuals with and without the physiological condition, but otherwise similar, are hybridized to an array of this invention. The hybridization of the prepared samples are measured and compared to, if possible, determine a profile associated with the physiological condition. The profile may be optimized by statistical analysis, as is known in the art, to only contain profile data on probes necessary for diagnosing the physiological condition.

[0068] The profile associated with a physiological condition can then be used for diagnosis or evaluation using the arrays of this invention, such as in Example 7. The profile of the physiological condition can be analyzed and the analysis used to optimize an array for diagnosis of the physiological condition. An optimized array for diagnosis of a physiological condition minimally contains at least one probe for the one or more genes that have altered expression levels in the context of the physiological condition, and probes for enough genes to eliminate other likely diagnoses. Diagnosis involves collecting a sample from an individual who might have the physiological condition, and determining the profile of the prepared sample using an array of this invention, using an array containing probes for all genes involved in mitochondrial biology or fewer probes with at least as many probes as necessary for an array optimized for diagnosis of the physiological condition. The profile of the individual is then compared to the profile of the physiological condition, and the comparison is analyzed to determine the likelihood that the individual has the physiological condition. Arrays of this invention can also be used for screening individuals who are not suspected of having the particular physiological condition. A sample is collected from such an individual, prepared, and the mitochondrial biology profile of the individual is determined using an array of this invention, e.g., an array containing probes for all genes involved in mitochondrial biology. The profile of this individual is then compared to known mitochondrial biology profiles of one or more physiological conditions that the individual may have, to determine if the profile of the individual is indicative of a diagnosable physiological condition. As demonstrated in Example 16, the arrays of this invention are also useful for detecting profiles indicative of physiological conditions before the appearance of other symptoms.

[0069] The profile of, or associated with, a physiological condition is also useful for identifying biochemical pathways affected by the physiological condition and genes involved in causation of the physiological condition. If a profile of a physiological condition demonstrates alteration in the expression of a gene, that gene is a candidate for sequencing to identify a mutation causing the physiological condition. If a profile demonstrates alteration of expression of several genes, then genes known to regulate those are candidates for sequencing to identify a mutation causing the physiological condition. Example 3 describes using the arrays of this invention for the identification of mutations associated with physiological conditions.

[0070] The profile of a physiological condition is useful for creating and/or identifying animal models of human physiological conditions. The profile of a physiological condition may suggest types of mutations, such as knockouts, to create in order to mimic the physiological condition in an animal. The arrays of this invention are also useful for screening genetically engineered or other mutated populations to identify an individual animal having a similar profile, and thus associated with the physiological condition.

[0071] The same individual can be profiled, using arrays of this invention, repeatedly over time or after exposure to various environmental conditions, thereby determining the effects of time or exposure. Equivalent individuals can also be profiled, using the arrays of this invention, at different ages or after exposure to different environmental conditions, thereby determining the effects of time or exposure. For example, a control group of mice of a particular genotype and of a particular age can be compared, using the arrays of this invention, to a group of experimental mice of the same genotype and age, that has been exposed to a certain environmental hazard, to determine the effects of the environmental hazard. Cell lines, as well as organisms, can be profiled after exposure to different environmental conditions, as in Example 15. Arrays of this invention are also useful for determining the effects of aging. Examples 8 and 19 demonstrate differences in profiles at different ages.

[0072] Therapy is an environmental condition, the effects of which can be tested using the arrays of this invention. Identification of the pathways affected in a physiological condition allows identification of therapies useful to treat individuals having the physiological condition. For example, if profiles are determined for the effects of classes of therapeutic agents, as new physiological conditions are profiled, relevant therapeutic agents can be easily identified. The profile of a physiological condition is useful for testing candidate therapies for treating individuals with the physiological condition. Any individual, with or without the physiological condition, an animal model of the physiological condition in humans, or a cell line representative of an individual with the physiological condition, can be treated with a candidate therapy. A sample for profiling is collected after treatment, prepared, the profile is determined using an array of this invention, and compared to the profile of the same individual before treatment or to equivalent individuals or cells without treatment to determine the effect of the treatment. Therapies reversing the effects of the physiological condition can thereby be identified. Preventative therapies and therapies causing desired physiological conditions can similarly be identified.

[0073] The arrays of this invention are useful for monitoring the effectiveness of a therapy for a particular individual as well as for a population. The profile of a diagnosed individual can be determined, the individual given a therapy, and then the profile of the individual determined again, using the arrays of this invention. The therapy can be modified and the profile retested, until a satisfactory treated profile is obtained.

[0074] Arrays containing probes hybridizing at moderate to high stringency with human genes involved in mitochondrial biology are used for assaying prepared samples from humans, human cell lines, and prepared samples from closely related species. Arrays containing probes hybridizing at moderate to high stringency with mouse genes involved in mitochondrial biology are used for assaying prepared samples from mice, mouse cell lines, and prepared samples from closely related species.

[0075] The arrays of this invention are made using probes for genes involved in mitochondrial biology. Probes can be selected and generated from the lists of clones and sequences in Tables 3-5, or from sequences and clones representing genes involved in mitochondrial biology not listed in these tables. Probes can be generated in vitro by nucleic acid synthesis, PCR, cloning techniques or other techniques known in the art. Flanking or vector sequence may be minimized in the probe. Probes generated from Research Genetics clones (ResGen/Invitrogen, Carlsbad, Calif.) can be amplified by PCR as described in Example 22. Optionally, control probes are also selected for the arrays of this invention. Examples of clones and sequences for making control probes are listed in Table 6, SEQ ID NOS:3041-3044. If housekeeping genes are chosen as positive controls, usually they are derived from the same species as the non-control probes. Housekeeping gene probes are available from Stratagene (Spot Report™, La Jolla, Calif., USA).

[0076] Examples of housekeeping genes are shown in Table 2. Housekeeping genes generally have a consistent amount of expression in all cells. Using the arrays of this invention, the expression of the 25 housekeeping genes listed in Table 2 were compared in 4 cell lines, LMEB4, NZB, 501-1, and the LM(TK)-cell line grown in media supplemented with glucose, pyruvate, and uridine (GUP). Some variability was present between cell lines. Housekeeping genes were also tested in 6 different mouse tissue samples (brain, heart, liver, kidney, spleen and muscle) in two strains of mice, CAP^{R} and NZB. Variation was again present, but slight.

TABLE 2

| Description | Functional Class |
|---|---|
| Actin-gamma | Structural gene |
| A272 Capping protein | Structrual gene |
| Glyceraldehyde phosphate dehydrogenase | Metabolism-glycolysis |
| DNA ligase I | DNA repair/synthesis |
| β-actin | Structural |
| Alkaline Phosphatase | Unclassified |
| 40s Ribosomal protein S15 | Protein synthesis |
| Hypozanthine phosphoribosyl transferase | Metabolism-nucleotide |
| (HPRT) | |
| Ribosomal protein L15 | Protein synthesis |
| Ribosomal Protein S29 | Protein translation |
| Acient ubiquinating protein | Metabolism-protein |
| Glyceraldehyde 3-phosphate dehydrogenase | Metabolism-glycolysis |
| Actin-α (skeletal muscle) | Structural |
| Murine ornithine decarboxylase | Metabolism-amino acid |
| calcium binding protein Cab45 | Calcium homeostasis |
| Ribosomal protein L1A | Protein synthesis |
| RNA splicing protein | RNA processing |
| Actin-gamma (smooth muscle) | Structural gene |
| E2F transcription factor | Transcriptional regulation |
| Ubiquitin | Unclassified |
| Myosin 1 | Structural |
| HPRT | Metabolism-nucleotide |
| Phospholipase A2 (14-3-3 zeta/delta) | Signal transduction |
| HPRT | Metabolism-nucleotide |
| Ribosomal protein L3 | Protein synthesis |

[0077] Arrays can be printed on solid substrates, e.g., glass microscope slides. Before printing, slides are prepared to provide a substrate for binding as in Example 23. Arrays can be printed using any printing techniques and machines known in the art. Printing involves placing the probes on the substrate, attaching the probes to the substrate, and blocking the substrate to prevent non-specific hybridization, as described in Example 24.

[0078] Samples useful for analyses using the arrays of this invention include total RNA samples and mRNA samples. RNA samples can be prepared as described in Example 25. An RNA sample is reverse transcribed into cDNA and simultaneously labeled, i.e. with one member of a two-color fluorescent system, such as Cy3-dCTP/Cy5-dCTP as described in Example 26. The arrays are hybridized with the prepared sample and washed at appropriate stringencies accounting for the choices of sample and probes of the array. The hybridization stringency can be higher when the probe sequence has higher homology with the gene it interrogates and when the probe is larger. A reference target, standard target, or other sample target for direct comparison may be prepared and hybridized simultaneously to the same array. A prepared sample will not degrade during hybridization and is labeled. Prepared samples are reverse transcribed and fluorescently labeled.

[0079] Hybridization results can be measured and analyzed using equipment and software available in the art as described in Example 27. Before finalizing data, preliminary results are preferably normalized by methods known in the art. An example of normalization appears in Example 29. Analysis includes determination of statistical significance. Measurement may include normalization and analysis, including statistical analysis. Resulting data are typically stored in computer files.

[0080] Mitochondrial biology expression microarrays are useful for detecting alterations in gene expression caused by alterations in mitochondrial biology. Although commercially available total genome expression arrays from companies such as Incyte Pharmaceuticals or Affymetrix contain probes for ten to twenty times as many genes as the arrays of this invention, the commercially available arrays have limitations. Several genes and probes that have been included on the arrays of this invention are not available on the commercial arrays. The commercial arrays are also very expensive and the large data sets resulting from them can be rather cumbersome to analyze and manipulate. The smaller, more focused arrays of this invention allow the expression patterns of hundreds of mitochondrial genes to be monitored quickly and efficiently. This study shows that a custom-designed microarray for mitochondrial biology expression studies, including probes for nuclear as well as mitochondrial genes, is an effective tool for the analysis of gene expression changes caused by alterations in functions resulting from a mutation in a gene involved in mitochondrial biology or other changes in metabolic state. The cell line experiments in Examples 13-17 and 20 have been particularly informative in demonstrating the specificity and sensitivity of the arrays of this invention while the mouse tissue experiments in Examples 8-12 and 16-17 have shown the consistency of the arrays of this invention.

[0081] Clones used to generate probes are listed in Tables 3-5. Clones range from about 1 kb to about 4 kb. The inserts of most clones have been sequenced on the 5′ and 3′ ends. Sequences of the 5 and 3′ ends of the clones are usually about 200 nt to about 800 nt and are provided herein. Probes may be generated via several methods. For example, the clones listed in Tables 3-5 may be obtained commercially, the inserts purified and used as probes. Alternatively, a 5′ or 3 sequence given in the sequence listings hereof may be used to design an oligonucleotide which may be synthesized and used to probe a library to identify a cDNA or genomic clone that is equivalent to the clone used to generate the original sequence. This newly identified cDNA or genomic equivalent clone may be used to generate a probe. Alternatively, a pair of sequences from the sequence listings, representing the 5 and 3′ ends of one clone, may be used to design PCR primers, which may be used to PCR amplify an isolated nucleic acid that is quivalent to the insert of the corresponding clone from which the 5′ and 3′ were derived. This isolated nucleic acid may be used as a probe. Probes should not contain a vector sequence that hybridizes with any sequence in a sample. Methods for designing PCR primers and designing oligonucleotides for screening libraries are known in the art.

### EXAMPLES

### Example 1

Human Mitochondrial Biology Array

[0082] A human mitochondrial biology array is made from clones representing 650 expressed sequences involved in mitochondrial biology. The clones used to make probes that are placed on the array are shown in Table 3 which references SEQ ID NOS: 1-994 provided herein setting forth the 5′ and 3′ sequences from these clones. The clones identified in Table 3 are used to make a set of probes called Human Probe Set #1. Control sequences are also placed this array. Controls include, but are not limited to blanks, DMSO, probes derived from plant sequences, sequence(s) not involved in mitochondrial biology, and poly adenine (40-60 nucleotides long).

TABLE 3

| SEQ | | | | | |
|---|---|---|---|---|---|
| ID | ResGen | | | | UniGene |
| NO | Clone ID | Gene | Complete Gene Name | GenBank | Cluster ID |
| 1 | | mtDNA - 12S ribosome | Mitochondrial DNA 12S | | |
| 2 | | mtDNA - 16S ribosome | Mitochondrial DNA 16s | | |
| 3 | | mtDNA - ATP6 | Mitochondrial DNA ATP6 | | |
| 4 | | mtDNA - ATP8 | Mitochondrial DNA ATP8 | | |
| 5 | | mtDNA - COX1 | Mitochondrial DNA COX1 | | |
| 6 | | mtDNA - COX2 | Mitochondrial DNA COX2 | | |
| 7 | | mtDNA - COX3 | Mitochondrial DNA COX3 | | |
| 8 | | mtDNA - CYT B | Mitochondrial DNA CYTb | | |
| 9 | | mtDNA - ND1 | Mitochondrial DNA ND1 | | |
| 10 | | mtDNA - ND2 | Mitochondrial DNA ND2 | | |
| 11 | | mtDNA - ND3 | Mitochondrial DNA ND3 | | |
| 12 | | mtDNA - ND4 | Mitochondrial DNA ND4 | | |
| 13 | | mtDNA - ND4L | Mitochondrial DNA ND4L | | |
| 14 | | mtDNA - ND5 | Mitochondrial DNA ND5 | | |
| 15 | | mtDNA - ND6 | Mitochondrial DNA ND6 | | |
| 16 | 213890 | DECR1 | 2,4-dienoyl CoA reductase | H72937 | Hs.81548 |
| 17 | 213890 | DECR1 | 2,4-dienoyl CoA reductase | H72938 | Hs.81548 |
| 18 | 588911 | OAS1 | 2′,5′-oligoadenylate synthetase 1 | AA146773 | Hs.82396 |
| 19 | 588911 | OAS1 | 2′,5′-oligoadenylate synthetase 1 | AA146772 | Hs.82396 |
| 20 | 1576254 | 2′,5′-oligoadenylate | 2′,5′-oligoadenylate synthetase 1 | AA954880 | Hs.82396 |
| | | synthetase 1 | | | |
| 21 | 1057786 | OAS2 (splice-variant) | 2′-5′oligoadenylate synthetase 2 | AA568217 | |
| 22 | 2190112 | A38234 | 2-OXOGLUTARATE | AI610813 | |
| | | | DEHYDROGENASE E1 COMPONENT | | |
| 23 | 814444 | CRSP9 | 33 kDa transcriptional co-activator | AA459244 | Hs.7558 |
| 24 | 814444 | CRSP9 | 33 kDa transcriptional co-activator | AA459465 | Hs.7558 |
| 25 | 896949 | HMGCR | 3-hydroxy-3-methylglutaryl-Coenzyme A | AA779417 | |
| | | | reductase | | |
| 26 | 290111 | HMGCS1 | 3-hydroxy-3-methylglutaryl-Coenzyme A | N62195 | Hs.77910 |
| | | | synthase 1 (soluble) | | |
| 27 | 290111 | HMGCS1 | 3-hydroxy-3-methylglutaryl-Coenzyme A | N76492 | Hs.77910 |
| | | | synthase 1 (soluble) | | |
| 28 | 757222 | HMGCS2 | 3-hydroxy-3-methylglutaryl-Coenzyme A | AA496148 | |
| | | | synthase 2 (mitochondrial) | | |
| 29 | 757222 | HMGCS2 | 3-hydroxy-3-methylglutaryl-Coenzyme A | AA496149 | |
| | | | synthase 2 (mitochondrial) | | |
| 30 | 109310 | HAAO | 3-hydroxyanthranilate 3,4-dioxygenase | T80846 | |
| 31 | 109310 | HAAO | 3-hydroxyanthranilate 3,4-dioxygenase | T80921 | |
| 32 | 1635163 | HAAO | 3-hydroxyanthranilate 3,4-dioxygenase | AI005031 | |
| 33 | 66564 | BDH | 3-hydroxybutyrate dehydrogenase (heart, | T67057 | Hs.76893 |
| | | | mitochondrial) | | |
| 34 | 66564 | BDH | 3-hydroxybutyrate dehydrogenase (heart, | T67058 | Hs.76893 |
| | | | mitochondrial) | | |
| 35 | 838366 | HMGCL | 3-hydroxymethyl-3-methylglutaryl- | AA458779 | Hs.831 |
| | | | Coenzyme A lyase | | |
| | | | (hydroxymethylglutaricaciduria) | | |
| 36 | 838366 | HMGCL | 3-hydroxymethyl-3-methylglutaryl- | AA458172 | Hs.831 |
| | | | Coenzyme A lyase | | |
| | | | (hydroxymethylglutaricaciduria) | | |
| 37 | 28469 | OXCT | 3-oxoacid CoA transferase | R13381 | |
| 38 | 28469 | OXCT | 3-oxoacid CoA transferase | R40897 | |
| 39 | 591540 | PHGDH | 3-phosphoglycerate dehydrogenase | AA158735 | |
| 40 | 591540 | PHGDH | 3-phosphoglycerate dehydrogenase | AA159852 | |
| 41 | 266720 | PDPK1 | 3-phosphoinositide dependent protein | N22904 | |
| | | | kinase-1 | | |
| 42 | 266720 | PDPK1 | 3-phosphoinositide dependent protein | N31292 | |
| | | | kinase-1 | | |
| 43 | 666169 | MTR | 5-methyltetrahydrofolate-homocysteine | AA233640 | |
| | | | methyltransferase | | |
| 44 | 666169 | MTR | 5-methyltetrahydrofolate-homocysteine | AA233650 | |
| | | | methyltransferase | | |
| 45 | 814765 | AKAP1 | A kinase anchor protein, 149 kD | AA454947 | Hs.78921 |
| 46 | 814765 | AKAP1 | A kinase anchor protein, 149 kD | AA455326 | Hs.78921 |
| 47 | 2364633 | A32422 | A32422 | AI744652 | |
| 48 | 2308263 | A40487 | A40487 | AI671604 | |
| 49 | 2240514 | AAP1′ | AAP1′ | AI637909 | |
| 50 | 2266774 | ABF2 | ABF2 | AI590841 | |
| 51 | 36393 | ACAT2 | acetyl-Coenzyme A acetyltransferase 2 | R25823 | |
| | | | (acetoacetyl Coenzyme A thiolase) | | |
| 52 | 36393 | ACAT2 | acetyl-Coenzyme A acetyltransferase 2 | R46821 | |
| | | | (acetoacetyl Coenzyme A thiolase) | | |
| 53 | 45376 | ACAA2 | acetyl-Coenzyme A acyltransferase 2 | H07926 | Hs.32500 |
| | | | (mitochondrial 3-oxoacyl-Coenzyme A | | |
| | | | thiolase) | | |
| 54 | 45376 | ACAA2 | acetyl-Coenzyme A acyltransferase 2 | H08029 | Hs.32500 |
| | | | (mitochondrial 3-oxoacyl-Coenzyme A | | |
| | | | thiolase) | | |
| 55 | 262932 | ACO2 | Aconitase 2, mitochondrial | H99699 | Hs.75900 |
| 56 | 366511 | No Data | Actin, alpha 1, skeletal muscle | AA026609 | |
| 57 | 366511 | No Data | Actin, alpha 1, skeletal muscle | AA026720 | |
| 58 | 867606 | ACTB | actin, beta | AA780815 | |
| 59 | 428215 | ACTL6 | actin-like 6 | AA001745 | Hs.103180 |
| 60 | 428215 | ACTL6 | actin-like 6 | AA001815 | Hs.103180 |
| 61 | 896962 | ACADS | acyl-Coenzyme A dehydrogenase, C-2 to | AA676663 | Hs.127610 |
| | | | C-3 short chain | | |
| 62 | 298155 | ACADM | Acyl-Coenzyme A dehydrogenase, C-4 to | N70794 | Hs.79158 |
| | | | C-12 straight chain | | |
| 63 | 140131 | ACADL | acyl-Coenzyme A dehydrogenase, long | R66005 | Hs.1209 |
| | | | chain | | |
| 64 | 140131 | ACADL | acyl-Coenzyme A dehydrogenase, long | R66006 | Hs.1209 |
| | | | chain | | |
| 65 | 243100 | ACADSB | acyl-Coenzyme A dehydrogenase, | H95792 | Hs.81934 |
| | | | short/branched chain | | |
| 66 | 243100 | ACADSB | acyl-Coenzyme A dehydrogenase, | H96140 | Hs.81934 |
| | | | short/branched chain | | |
| 67 | 810358 | ACADVL | Acyl-Coenzyme A dehydrogenase, very | AA464163 | Hs.82208 |
| | | | long chain | | |
| 68 | 810358 | ACADVL | Acyl-Coenzyme A dehydrogenase, very | AA464228 | Hs.82208 |
| | | | long chain | | |
| 69 | 85450 | ACOX2 | acyl-Coenzyme A oxidase 2, branched | T71713 | Hs.9795 |
| | | | chain | | |
| 70 | 85450 | ACOX2 | acyl-Coenzyme A oxidase 2, branched | T71782 | Hs.9795 |
| | | | chain | | |
| 71 | 772304 | ANT2 | Adenine nucleotide translocator 2 | AA404486 | Hs.79172 |
| | | | (fibroblast) | | |
| 72 | 772304 | ANT2 | Adenine nucleotide translocator 2 | AA405477 | Hs.79172 |
| | | | (fibroblast) | | |
| 73 | 755855 | ANT3 | adenine nucleotide translocator 3 (liver) | AA496376 | Hs.164280 |
| 74 | 755855 | ANT3 | adenine nucleotide translocator 3 (liver) | AA496654 | Hs.164280 |
| 75 | 853570 | ANT3 | Adenine nucleotide translocator 3 (liver) | AA663439 | Hs.164280 |
| 76 | 868757 | AK1 | Adenylate kinase 1 | AA775325 | Hs.76240 |
| 77 | 2010933 | KAD2_HUMAN | ADENYLATE KINASE ISOENZYME 2 | AI361029 | |
| 78 | 40026 | ANT1 | ADP, ATP CARRIER PROTEIN, | R53337 | Hs.2043 |
| | | | HEART/SKELETAL MUSCLE | | |
| | | | ISOFORM T1 | | |
| 79 | 40026 | ANT1 | ADP, ATP CARRIER PROTEIN, | R53942 | Hs.2043 |
| | | | HEART/SKELETAL MUSCLE | | |
| | | | ISOFORM T1 | | |
| 80 | 46248 | ADPRT | ADP-ribosyltransferase (NAD+; poly | H09923 | Hs.177766 |
| | | | (ADP-ribose) polymerase) | | |
| 81 | 46248 | ADPRT | ADP-ribosyltransferase (NAD+; poly | H09924 | Hs.177766 |
| | | | (ADP-ribose) polymerase) | | |
| 82 | 589276 | AFG3L2 | AFG3 (ATPase family gene 3, yeast)-like 2 | AA147320 | Hs.29385 |
| 83 | 589276 | AFG3L2 | AFG3 (ATPase family gene 3, yeast)-like 2 | AA147413 | Hs.29385 |
| 84 | 1018253 | AIF | AIF | AA570483 | |
| 85 | 855624 | ALDH1 | aldehyde dehydrogenase 1, soluble | AA664101 | Hs.76392 |
| 86 | 47853 | ALDH4 | aldehyde dehydrogenase 4 (glutamate | H11346 | Hs.77448 |
| | | | gamma-semialdehyde dehydrogenase; | | |
| | | | pyrroline-5-carboxylate dehydrogenase) | | |
| 87 | 47853 | ALDH4 | aldehyde dehydrogenase 4 (glutamate | H11369 | Hs.77448 |
| | | | gamma-semialdehyde dehydrogenase; | | |
| | | | pyrroline-5-carboxylate dehydrogenase) | | |
| 88 | 197657 | ALDH5 | ALDEHYDE DEHYDROGENASE, | R93550 | Hs.169517 |
| | | | MITOCHONDRIAL X PRECURSOR | | |
| 89 | 197657 | ALDH5 | ALDEHYDE DEHYDROGENASE, | R93551 | Hs.169517 |
| | | | MITOCHONDRIAL X PRECURSOR | | |
| 90 | 1917741 | AOX1 | aldehyde oxidase 1 | AI343711 | Hs.81047 |
| 91 | 2154324 | AGPS | alkylglycerone phosphate synthase | AI445035 | |
| 92 | 1520618 | GABT_HUMAN | AMINOBUTYRATE | AA910669 | |
| | | | AMINOTRANSFERASE | | |
| 93 | 813651 | ALAS1 | aminolevulinate, delta-, synthase 1 | AA447761 | Hs.78712 |
| 94 | 813651 | ALAS1 | aminolevulinate, delta-, synthase 1 | AA453691 | Hs.78712 |
| 95 | 753346 | ALAS2 | aminolevulinate, delta-, synthase 2 | AA406485 | Hs.79103 |
| | | | (sideroblastic/hypochromic anemia) | | |
| 96 | 753346 | ALAS2 | aminolevulinate, delta-, synthase 2 | AA410346 | Hs.79103 |
| | | | (sideroblastic/hypochromic anemia) | | |
| 97 | 248631 | AMT | aminomethyltransferase (glycine cleavage | N59532 | Hs.102 |
| | | | system protein T) | | |
| 98 | 248631 | AMT | aminomethyltransferase (glycine cleavage | N78273 | Hs.102 |
| | | | system protein T) | | |
| 99 | 1556306 | ANT3 | ANT3 | AA916851 | |
| 100 | 471597 | API5L1 | API5-like 1 | AA035435 | Hs.227913 |
| 101 | 471597 | API5L1 | API5-like 1 | AA035436 | Hs.227913 |
| 102 | 127032 | API2 | apoptosis inhibitor 2 | R07870 | Hs.127799 |
| 103 | 127032 | API2 | apoptosis inhibitor 2 | R07927 | Hs.127799 |
| 104 | 2285739 | API3 | apoptosis inhibitor 3 | AI628066 | |
| 105 | 927606 | ARAL-1 | ARAL-1 | AA535370 | |
| 106 | 1704180 | XNHUDM | ASPARTATE AMINOTRANSFERASE | AI096615 | |
| 107 | 360778 | ATM | Ataxia telangiectasia mutated (includes | AA016254 | Hs.194382 |
| | | | complementation groups A, C and D) | | |
| 108 | 360778 | ATM | Ataxia telangiectasia mutated (includes | AA016988 | Hs.194382 |
| | | | complementation groups A, C and D) | | |
| 109 | 845519 | ATP5C1 | ATP SYNTHASE GAMMA CHAIN, | AA644234 | Hs.155433 |
| | | | MITOCHONDRIAL PRECURSOR | | |
| 110 | 813712 | ATP5F1 | ATP synthase, H+ transporting, | AA453765 | Hs.181101 |
| | | | mitochondrial F0 complex, subunit b, | | |
| | | | isoform 1 | | |
| 111 | 813712 | ATP5F1 | ATP synthase, H+ transporting, | AA453849 | Hs.181101 |
| | | | mitochondrial F0 complex, subunit b, | | |
| | | | isoform 1 | | |
| 112 | 193106 | ATP5G3 | ATP synthase, H+ transporting, | H47080 | Hs.429 |
| | | | mitochondrial F0 complex, subunit c | | |
| | | | (subunit 9) isoform 3 | | |
| 113 | 193106 | ATP5G3 | ATP synthase, H+ transporting, | H47164 | Hs.429 |
| | | | mitochondrial F0 complex, subunit c | | |
| | | | (subunit 9) isoform 3 | | |
| 114 | 487373 | ATP5G1 | ATP synthase, H+ transporting, | AA046701 | Hs.80986 |
| | | | mitochondrial F0 complex, subunit c | | |
| | | | (subunit 9), isoform 1 | | |
| 115 | 487373 | ATP5G1 | ATP synthase, H+ transporting, | AA046489 | Hs.80986 |
| | | | mitochondrial F0 complex, subunit c | | |
| | | | (subunit 9), isoform 1 | | |
| 116 | 809876 | ATP5G2 | ATP synthase, H+ transporting, | AA455126 | Hs.89399 |
| | | | mitochondrial F0 complex, subunit c | | |
| | | | (subunit 9), isoform 2 | | |
| 117 | 809876 | ATP5G2 | ATP synthase, H+ transporting, | AA464312 | Hs.89399 |
| | | | mitochondrial F0 complex, subunit c | | |
| | | | (subunit 9), isoform 2 | | |
| 118 | 825312 | ATP5J | ATP synthase, H+ transporting, | AA504540 | Hs.73851 |
| | | | mitochondrial F0 complex, subunit F6 | | |
| 119 | 825312 | ATP5J | ATP synthase, H+ transporting, | AA504465 | Hs.73851 |
| | | | mitochondrial F0 complex, subunit F6 | | |
| 120 | 392622 | ATP5B | ATP synthase, H+ transporting, | AA708298 | Hs.25 |
| | | | mitochondrial F1 complex, beta | | |
| | | | polypeptide | | |
| 121 | 856650 | ATP5D | ATP synthase, H+ transporting, | AA669314 | Hs.89761 |
| | | | mitochondrial F1 complex, delta subunit | | |
| 122 | 1472150 | ATP5O | ATP synthase, H+ transporting, | AA873577 | Hs.76572 |
| | | | mitochondrial F1 complex, O subunit | | |
| | | | (oligomycin sensitivity conferring | | |
| | | | protein) | | |
| 123 | 2098508 | ATP2B2 | ATP2B2 | AI421603 | Hs.89512 |
| 124 | 1753047 | ATP50 | ATP50 | AI184610 | |
| 125 | 1173869 | ATP5A1 | ATP5A1 | AA640573 | |
| 126 | 964121 | ATP5C1 | ATP5C1 | AA507388 | |
| 127 | 1736058 | ATP5F1 | ATP5F1 | AI126623 | |
| 128 | 307873 | ATP2B4 | ATPase, Ca++ transporting, plasma | N93024 | Hs.995 |
| | | | membrane 4 | | |
| 129 | 307873 | ATP2B4 | ATPase, Ca++ transporting, plasma | W21376 | Hs.995 |
| | | | membrane 4 | | |
| 130 | 1435103 | ATP2A3 | ATPase, Ca++ transporting, ubiquitous | AA857542 | Hs.5541 |
| 131 | 266312 | ATP7B | ATPase, Cu++ transporting, beta | N26536 | Hs.84999 |
| | | | polypeptide (Wilson disease) | | |
| 132 | 266312 | ATP7B | ATPase, Cu++ transporting, beta | N35647 | Hs.84999 |
| | | | polypeptide (Wilson disease) | | |
| 133 | 384078 | ATP6DV | ATPase, H+ transporting, lysosomal | AA702541 | Hs.106876 |
| | | | (vacuolar proton pump) 31 kD | | |
| 134 | 825170 | ATP6A1 | ATPase, H+ transporting, lysosomal | AA504160 | Hs.255352 |
| | | | (vacuolar proton pump), alpha | | |
| | | | polypeptide, 70 kD, isoform 1 | | |
| 135 | 825170 | ATP6A1 | ATPase, H+ transporting, lysosomal | AA504159 | Hs.255352 |
| | | | (vacuolar proton pump), alpha | | |
| | | | polypeptide, 70 kD, isoform 1 | | |
| 136 | 1323203 | ATP6B2 | ATPase, H+ transporting, lysosomal | AA877194 | Hs.1697 |
| | | | (vacuolar proton pump), beta polypeptide, | | |
| | | | 56/58 kD, isoform 2 | | |
| 137 | 461522 | ABCB7 | ATP-binding cassette, sub-family B | AA705237 | Hs.125856 |
| | | | (MDR/TAP), member 7 | | |
| 138 | 1709773 | MCX1 | ATP-DEPENDENT CLP PROTEASE | AI131257 | |
| 139 | 1467799 | KIAA0705 | atrophin-1 interacting protein 1 | AA883236 | Hs.22599 |
| 140 | 852273 | AZF1 | AZF1 | AA772863 | |
| 141 | 2367249 | B42665 | B42665 | AI741963 | |
| 142 | 194384 | BTF3 | Basic transcription factor 3 | R83000 | Hs.101025 |
| 143 | 194384 | BTF3 | Basic transcription factor 3 | R82957 | Hs.101025 |
| 144 | 342181 | BCL2 | B-cell CLL/lymphoma 2 | W63749 | Hs.79241 |
| 145 | 342181 | BCL2 | B-cell CLL/lymphoma 2 | W61100 | Hs.79241 |
| 146 | 826182 | BCL6 | B-cell CLL/lymphoma 6 (zinc finger | AA521434 | |
| | | | protein 51) | | |
| 147 | 814899 | BNIP3L | BCL2/adenovirus E1B 19 kD-interacting | AA465697 | Hs.132955 |
| | | | protein 3-like | | |
| 148 | 235938 | BAK1 | BCL2-antagonist/killer 1 | H52672 | |
| 149 | 235938 | BAK1 | BCL2-antagonist/killer 1 | H52673 | |
| 150 | 2125819 | BAX | BCL2-associated X protein | AI565203 | |
| 151 | 1916575 | BIK | BCL2-interacting killer (apoptosis- | AI347538 | |
| | | | inducing) | | |
| 152 | 1568561 | BCL2L1 | BCL2-like 1 | AA931820 | Hs.180372 |
| 153 | 2297154 | BCS1 | BCS1 | AI670836 | |
| 154 | 813444 | BZRP | benzodiazapine receptor (peripheral) | AA455945 | Hs.202 |
| 155 | 813444 | BZRP | benzodiazapine receptor (peripheral) | AA455554 | Hs.202 |
| 156 | 627125 | BID | BH3 interacting domain death agonist | AA190401 | |
| 157 | 627125 | BID | BH3 interacting domain death agonist | AA190546 | |
| 158 | 1573108 | BCKDK | branched chain alpha-ketoacid | AA970731 | Hs.20644 |
| | | | dehydrogenase kinase | | |
| 159 | 756490 | BCAT2 | branched chain aminotransferase 2, | AA436410 | Hs.101408 |
| | | | mitochondrial | | |
| 160 | 756490 | BCAT2 | branched chain aminotransferase 2, | AA481353 | Hs.101408 |
| | | | mitochondrial | | |
| 161 | 740801 | BCKDHA | branched chain keto acid dehydrogenase | AA477298 | Hs.78950 |
| | | | E1, alpha polypeptide (maple syrup urine | | |
| | | | disease) | | |
| 162 | 740801 | BCKDHA | branched chain keto acid dehydrogenase | AA477297 | Hs.78950 |
| | | | E1, alpha polypeptide (maple syrup urine | | |
| | | | disease) | | |
| 163 | 770835 | BCKDHB | Branched chain keto acid dehydrogenase | AA427739 | Hs.1265 |
| | | | E1, beta polypeptide (maple syrup urine | | |
| | | | disease) | | |
| 164 | 770835 | BCKDHB | Branched chain keto acid dehydrogenase | AA434304 | Hs.1265 |
| | | | E1, beta polypeptide (maple syrup urine | | |
| | | | disease) | | |
| 165 | 129431 | EST | BRCA2(?) | R11316 | Hs.188591 |
| 166 | 129431 | EST | BRCA2(?) | R11315 | Hs.188591 |
| 167 | 83605 | CPS1 | carbamoyl-phosphate synthetase 1, | T61078 | Hs.50966 |
| | | | mitochondrial | | |
| 168 | 83605 | CPS1 | carbamoyl-phosphate synthetase 1, | T61180 | Hs.50966 |
| | | | mitochondrial | | |
| 169 | 1675950 | CRHU5 | CARBONIC ANHYDRASE V | AI052226 | |
| | | | PRECURSOR | | |
| 170 | 744417 | CRAT | Carnitine acetyltransferase | AA621218 | Hs.12068 |
| 171 | 133565 | CPT1A | carnitine palmitoyltransferase I, liver | R28631 | Hs.29331 |
| 172 | 133565 | CPT1A | carnitine palmitoyltransferase I, liver | R32561 | Hs.29331 |
| 173 | 415978 | CPT1A | carnitine palmitoyltransferase I, liver | W85710 | Hs.29331 |
| 174 | 415978 | CPT1A | carnitine palmitoyltransferase I, liver | W86378 | Hs.29331 |
| 175 | 120106 | CASP1 | caspase 1, apoptosis-related cysteine | T95052 | |
| | | | protease (interleukin 1, beta, convertase) | | |
| 176 | 120106 | CASP1 | caspase 1, apoptosis-related cysteine | T95149 | |
| | | | protease (interleukin 1, beta, convertase) | | |
| 177 | 30170 | CASP3 | caspase 3, apoptosis-related cysteine | R14760 | |
| | | | protease | | |
| 178 | 30170 | CASP3 | caspase 3, apoptosis-related cysteine | R42530 | |
| | | | protease | | |
| 179 | 429574 | CASP3 | caspase 3, apoptosis-related cysteine | AA011445 | |
| | | | protease | | |
| 180 | 429574 | CASP3 | caspase 3, apoptosis-related cysteine | AA011446 | |
| | | | protease | | |
| 181 | 745143 | CASP6 | caspase 6, apoptosis-related cysteine | AA626710 | |
| | | | protease | | |
| 182 | 279691 | CD2AP | CD2-associated protein | N48329 | Hs.30490 |
| 183 | 279691 | CD2AP | CD2-associated protein | N49054 | Hs.30490 |
| 184 | 1558965 | CDC2L | cholinesterase-related cell division | AA917769 | Hs.155266 |
| | | | controller | | |
| 185 | 324885 | C11ORF4 | chromosome 11 open reading frame 4 | W48701 | Hs.75859 |
| 186 | 324885 | C11ORF4 | chromosome 11 open reading frame 4 | W48700 | Hs.75859 |
| 187 | 1573778 | C11ORF13 | chromosome 11 open reading frame 13 | AA970526 | Hs.72925 |
| 188 | 110772 | C14ORF2 | chromosome 14 open reading frame 2 | T90621 | Hs.109052 |
| 189 | 110772 | C14ORF2 | chromosome 14 open reading frame 2 | T83147 | Hs.109052 |
| 190 | 897448 | C2ORF1 | chromosome 2 open reading frame 1 | AA489478 | Hs.14454 |
| 191 | 1060841 | CIT1 | CITRATE SYNTHASE, | AA568724 | |
| | | | MITOCHONDRIAL PRECURSOR | | |
| 192 | 310519 | F10 | COAGULATION FACTOR X | N98524 | Hs.47913 |
| | | | PRECURSOR | | |
| 193 | 310519 | F10 | COAGULATION FACTOR X | W31088 | Hs.47913 |
| | | | PRECURSOR | | |
| 194 | 436062 | CPO | coproporphyrinogen oxidase | AA700808 | Hs.89866 |
| | | | (coproporphyria, harderoporphyria) | | |
| 195 | 161476 | COQ5 | COQ5 | H25602 | |
| 196 | 161476 | COQ5 | COQ5 | H25556 | |
| 197 | 2338136 | COX11.1-11.2 | COX11.1-11.2 | AI703310 | |
| 198 | 1902314 | COX15.1 | COX15.1 | AI301929 | |
| 199 | 1318021 | COX5A | COX5A | AA769095 | |
| 200 | 2326019 | COX5B | COX5B | AI688757 | Hs.1342 |
| 201 | 2301230 | COX5B | COX5B | AI699318 | |
| 202 | 2097122 | COX6A1 | COX6A1 | AI421088 | |
| 203 | 986164 | COX6A2 | COX6A2 | AA548887 | |
| 204 | 2277616 | COX6B | COX6B | AI690478 | |
| 205 | 971851 | COX7A1 | COX7A1 | AA515958 | |
| 206 | 937944 | COX7A2 | COX7A2 | AA563616 | |
| 207 | 2019469 | CKMT1 | creatine kinase, mitochondrial 1 | AI369378 | Hs.153998 |
| | | | (ubiquitous) | | |
| 208 | 795965 | CKMT2 | Creatine kinase, mitochondrial 2 | AA460480 | Hs.80691 |
| | | | (sarcomeric) | | |
| 209 | 795965 | CKMT2 | Creatine kinase, mitochondrial 2 | AA461048 | Hs.80691 |
| | | | (sarcomeric) | | |
| 210 | 771327 | NIFS | cysteine desulfurase | AA476245 | Hs.194692 |
| 211 | 771327 | NIFS | cysteine desulfurase | AA476244 | Hs.194692 |
| 212 | 196189 | CYB5 | Cytochrome b-5 | R92281 | Hs.83834 |
| 213 | 196189 | CYB5 | Cytochrome b-5 | R91950 | Hs.83834 |
| 214 | 840894 | COX6A1 | CYTOCHROME C OXIDASE | AA482243 | Hs.180714 |
| | | | POLYPEPTIDE VIA-LIVER | | |
| | | | PRECURSOR | | |
| 215 | 840894 | COX6A1 | CYTOCHROME C OXIDASE | AA482340 | Hs.180714 |
| | | | POLYPEPTIDE VIA-LIVER | | |
| | | | PRECURSOR | | |
| 216 | 824068 | COX5A | cytochrome c oxidase subunit Va | AA490735 | |
| 217 | 824068 | COX5A | cytochrome c oxidase subunit Va | AA491224 | |
| 218 | 298965 | COX6B | Cytochrome c oxidase subunit VIb | N71160 | Hs.174031 |
| 219 | 298965 | COX6B | Cytochrome c oxidase subunit VIb | W05541 | Hs.174031 |
| 220 | 1472754 | COX6B | cytochrome c oxidase subunit VIb | AA872391 | Hs.174031 |
| 221 | 838568 | COX6C | cytochrome c oxidase subunit VIc | AA456931 | Hs.74649 |
| 222 | 838568 | COX6C | cytochrome c oxidase subunit VIc | AA457006 | Hs.74649 |
| 223 | 1475803 | COX7A1 | cytochrome c oxidase subunit VIIa | AA872125 | Hs.114346 |
| | | | polypeptide 1 (muscle) | | |
| 224 | 1601947 | COX7A2 | cytochrome c oxidase subunit VIIa | AI002403 | Hs.182684 |
| | | | polypeptide 2 (liver) | | |
| 225 | 884511 | COX7B | cytochrome c oxidase subunit VIIb | AA629999 | Hs.75752 |
| 226 | 884480 | COX7C | cytochrome c oxidase subunit VIIc | AA629719 | Hs.3462 |
| 227 | 1469230 | COX8 | cytochrome c oxidase subunit VIII | AA862813 | Hs.81097 |
| 228 | 160126 | COX10 | Cytochrome c oxidase subunit X (heme | H21868 | Hs.77513 |
| | | | A: farnesyltransferase | | |
| 229 | 160126 | COX10 | Cytochrome c oxidase subunit X (heme | H21869 | Hs.77513 |
| | | | A: farnesyltransferase | | |
| 230 | 1455394 | CYC1 | cytochrome c-1 | AA865265 | Hs.697 |
| 231 | 194949 | CYP3A7 | Cytochrome P450 IIIA7 (P450-HFLa) | R91078 | Hs.172323 |
| 232 | 194949 | CYP3A7 | Cytochrome P450 IIIA7 (P450-HFLa) | R91077 | Hs.172323 |
| 233 | 1724630 | S14367 | CYTOCHROME P450 XIA1 | AI183397 | |
| 234 | 85561 | CYP2A7 | cytochrome P450, subfamily IIA | T73031 | Hs.252937 |
| | | | (phenobarbital-inducible), polypeptide 7 | | |
| 235 | 85561 | CYP2A7 | cytochrome P450, subfamily IIA | T72259 | Hs.252937 |
| | | | (phenobarbital-inducible), polypeptide 7 | | |
| 236 | 246619 | CYP2C8 | Cytochrome P450, subfamily IIC | N53136 | |
| | | | (mephenytoin 4-hydroxylase) | | |
| 237 | 246619 | CYP2C8 | Cytochrome P450, subfamily IIC | N58566 | |
| | | | (mephenytoin 4-hydroxylase) | | |
| 238 | 195712 | CYP2C9 | Cytochrome P450, subfamily IIC | R89492 | Hs.167529 |
| | | | (mephenytoin 4-hydroxylase), | | |
| | | | polypeptide 9 | | |
| 239 | 195712 | CYP2C9 | Cytochrome P450, subfamily IIC | R89491 | Hs.167529 |
| | | | (mephenytoin 4-hydroxylase), | | |
| | | | polypeptide 9 | | |
| 240 | 1467195 | CYP11B1 | cytochrome P450, subfamily XIB (steroid | AA884709 | Hs.2610 |
| | | | 11-beta-hydroxylase), polypeptide 1 | | |
| 241 | 149737 | EST | Cytochrome P450, subfamily XIX | H00592 | Hs.141142 |
| | | | (aromatization of androgens) | | |
| 242 | 149737 | EST | Cytochrome P450, subfamily XIX | R82738 | Hs.141142 |
| | | | (aromatization of androgens) | | |
| 243 | 284620 | EST | Cytochrome P450, subfamily XXI | N64794 | Hs.124918 |
| | | | (steroid 21-hydroxylase, congenital | | |
| | | | adrenal hyperplasia) | | |
| 244 | 284620 | EST | Cytochrome P450, subfamily XXI | N77388 | Hs.124918 |
| | | | (steroid 21-hydroxylase, congenital | | |
| | | | adrenal hyperplasia) | | |
| 245 | 266146 | CYP24 | cytochrome P450, subfamily XXIV | N21576 | Hs.89663 |
| | | | (vitamin D 24-hydroxylase) | | |
| 246 | 266146 | CYP24 | cytochrome P450, subfamily XXIV | N30976 | Hs.89663 |
| | | | (vitamin D 24-hydroxylase) | | |
| 247 | 295843 | CYP27A1 | cytochrome P450, subfamily XXVIIA | N66957 | Hs.82568 |
| | | | (steroid 27-hydroxylase, | | |
| | | | cerebrotendinous xanthomatosis), | | |
| | | | polypeptide 1 | | |
| 248 | 2043415 | DAPK1 | death-associated protein kinase 1 | AI371096 | Hs.153924 |
| 249 | 2364396 | DEHUH2 | DEHUH2 | AI740677 | |
| 250 | 125722 | DGUOK | deoxyguanosine kinase | R07560 | Hs.77494 |
| 251 | 125722 | DGUOK | deoxyguanosine kinase | R07506 | Hs.77494 |
| 252 | 2096376 | S25665 | DIHYDROLIPOAMIDE | AI419467 | |
| | | | ACETYLTRANSFERASE | | |
| | | | COMPONENT | | |
| 253 | 813648 | DLD | dihydrolipoamide dehydrogenase (E3 | AA453679 | Hs.74635 |
| | | | component of pyruvate dehydrogenase | | |
| | | | complex, 2-oxo-glutarate complex, | | |
| | | | branched chain keto acid dehydrogenase | | |
| | | | complex) | | |
| 254 | 813648 | DLD | dihydrolipoamide dehydrogenase (E3 | AA447748 | Hs.74635 |
| | | | component of pyruvate dehydrogenase | | |
| | | | complex, 2-oxo-glutarate complex, | | |
| | | | branched chain keto acid dehydrogenase | | |
| | | | complex) | | |
| 255 | 271006 | DLAT | dihydrolipoamide S-acetyltransferase (E2 | N29901 | Hs.115285 |
| | | | component of pyruvate dehydrogenase | | |
| | | | complex) | | |
| 256 | 271006 | DLAT | dihydrolipoamide S-acetyltransferase (E2 | N42953 | Hs.115285 |
| | | | component of pyruvate dehydrogenase | | |
| | | | complex) | | |
| 257 | 815564 | DLST | Dihydrolipoamide S-succinyltransferase | AA456824 | Hs.196416 |
| | | | (E2 component of 2-oxo-glutarate | | |
| | | | complex) | | |
| 258 | 815564 | DLST | Dihydrolipoamide S-succinyltransferase | AA456899 | Hs.196416 |
| | | | (E2 component of 2-oxo-glutarate | | |
| | | | complex) | | |
| 259 | 1308945 | DIHYDROLIPOAMIDE | DIHYDROLIPOAMIDE | AA748401 | |
| | | SUCCINYLTRANSFERASE | SUCCINYLTRANSFERASE | | |
| 260 | 1308945 | DIHYDROLIPOAMIDE | DIHYDROLIPOAMIDE | AA746285 | |
| | | SUCCINYLTRANSFERASE | SUCCINYLTRANSFERASE | | |
| 261 | 417385 | Dihydroorotate | Dihydroorotate dehydrogenase | W88472 | Hs.125846 |
| | | dehydrogenase | | | |
| 262 | 417385 | Dihydroorotate | Dihydroorotate dehydrogenase | W89035 | Hs.125846 |
| | | dehydrogenase | | | |
| 263 | 611027 | dihydroorotate | dihydroorotate dehydrogenase | AA173122 | Hs.94925 |
| | | dehydrogenase | | | |
| 264 | 611027 | dihydroorotate | dihydroorotate dehydrogenase | AA173225 | Hs.94925 |
| | | dehydrogenase | | | |
| 265 | 884539 | DKFZP566D143 | DKFZP566D143 protein | AA629804 | |
| 266 | 630013 | MSH2 | DNA repair protein MSH2 | AA219060 | Hs.78934 |
| 267 | 630013 | MSH2 | DNA repair protein MSH2 | AA219061 | Hs.78934 |
| 268 | 666425 | PLCG1 | DNA topoisomerase I | AA232856 | Hs.317 |
| 269 | 666425 | PLCG1 | DNA topoisomerase I | AA233029 | Hs.317 |
| 270 | 810787 | HSPF1 | DNAJ PROTEIN HOMOLOG 1 | AA481758 | Hs.82646 |
| 271 | 810787 | HSPF1 | DNAJ PROTEIN HOMOLOG 1 | AA481022 | Hs.82646 |
| 272 | 1914863 | DYSF | dysferlin, limb girdle muscular dystrophy | AI310142 | Hs.143897 |
| | | | 2B (autosomal recessive) | | |
| 273 | 773399 | DMD | dystrophin (muscular dystrophy, | AA425649 | Hs.169470 |
| | | | Duchenne and Becker types), includes | | |
| | | | DXS142, DXS164, DXS206, DXS230, | | |
| | | | DXS239, DXS268, DXS269, DXS270, | | |
| | | | DXS272 | | |
| 274 | 773399 | DMD | dystrophin (muscular dystrophy, | AA427831 | Hs.169470 |
| | | | Duchenne and Becker types), includes | | |
| | | | DXS142, DXS164, DXS206, DXS230, | | |
| | | | DXS239, DXS268, DXS269, DXS270, | | |
| | | | DXS272 | | |
| 275 | 796197 | DMD | Dystrophin (muscular dystrophy, | AA461118 | Hs.169470 |
| | | | Duchenne and Becker types), includes | | |
| | | | DXS142, DXS164, DXS206, DXS230, | | |
| | | | DXS239, DXS268, DXS269, DXS270, | | |
| | | | DXS272 | | |
| 276 | 796197 | DMD | Dystrophin (muscular dystrophy, | AA461435 | Hs.169470 |
| | | | Duchenne and Becker types), includes | | |
| | | | DXS142, DXS164, DXS206, DXS230, | | |
| | | | DXS239, DXS268, DXS269, DXS270, | | |
| | | | DXS272 | | |
| 277 | 781017 | EGR2 | early growth response 2 (Krox-20 | AA446027 | Hs.1395 |
| | | | (Drosophila) homolog) | | |
| 278 | 781017 | EGR2 | early growth response 2 (Krox-20 | AA446300 | Hs.1395 |
| | | | (Drosophila) homolog) | | |
| 279 | 180512 | ENC1 | ectodermal-neural cortex (with BTB-like | R85090 | Hs.104925 |
| | | | domain) | | |
| 280 | 1744035 | A31998 | ELECTRON TRANSFER | AI192719 | |
| | | | FLAVOPROTEIN ALPHA-SUBUNIT | | |
| 281 | 2274670 | S32482 | ELECTRON TRANSFER | AI683530 | |
| | | | FLAVOPROTEIN BETA-SUBUNIT | | |
| 282 | 2267229 | S62767 | ELONGATION FACTOR TU | AI609398 | |
| 283 | 745542 | ECHS1 | enoyl Coenzyme A hydratase, short | AA626255 | Hs.76394 |
| | | | chain, 1, mitochondrial | | |
| 284 | 344272 | EMP3 | epithelial membrane protein 3 | W73810 | Hs.9999 |
| 285 | 344272 | EMP3 | epithelial membrane protein 3 | W73748 | Hs.9999 |
| 286 | 253725 | EST | EST | N21972 | Hs.43052 |
| 287 | 287569 | EST | EST | N62122 | Hs.83313 |
| 288 | 287569 | EST | EST | N78351 | Hs.83313 |
| 289 | 489755 | EST | EST | AA099554 | Hs.246174 |
| 290 | 489755 | EST | EST | AA101991 | Hs.246174 |
| 291 | 609989 | No Data | EST | AA169176 | |
| 292 | 609989 | No Data | EST | AA169296 | |
| 293 | 511012 | AGPS | EST - putative alkylglycerone phosphate | AA099787 | |
| | | | synthase | | |
| 294 | 511012 | AGPS | EST - putative alkylglycerone phosphate | AA102257 | |
| | | | synthase | | |
| 295 | 449504 | EST | EST, Weakly similar to predicted using | AA777928 | Hs.121993 |
| | | | Genefinder [C. elegans] | | |
| 296 | 47005 | EST | ESTs | H09825 | Hs.6818 |
| 297 | 47005 | EST | ESTs | H09920 | Hs.6818 |
| 298 | 79655 | EST | ESTs | T62655 | Hs.11039 |
| 299 | 79655 | EST | ESTs | T62509 | Hs.11039 |
| 300 | 126229 | EST | ESTs | R06313 | Hs.77677 |
| 301 | 126229 | EST | ESTs | R06258 | Hs.77677 |
| 302 | 129606 | EST | ESTs | R16545 | Hs.70333 |
| 303 | 129606 | EST | ESTs | R16603 | Hs.70333 |
| 304 | 165837 | EST | ESTs | R86713 | Hs.87595 |
| 305 | 165837 | EST | ESTs | R86712 | Hs.87595 |
| 306 | 248669 | EST | ESTs | N59553 | Hs.8941 |
| 307 | 248669 | EST | ESTs | N78295 | Hs.8941 |
| 308 | 254004 | EST | ESTs | N22302 | Hs.177861 |
| 309 | 254004 | EST | ESTs | N75187 | Hs.177861 |
| 310 | 259462 | LOC54675 | ESTs | N29545 | Hs.3569 |
| 311 | 290505 | EST | ESTs | N67991 | Hs.30487 |
| 312 | 290505 | EST | ESTs | N80413 | Hs.30487 |
| 313 | 341901 | EST | ESTs | W61374 | Hs.11317 |
| 314 | 429942 | EST | ESTs | AA034062 | Hs.38750 |
| 315 | 784214 | EST | ESTs | AA446865 | Hs.14018 |
| 316 | 784214 | EST | ESTs | AA446980 | Hs.14018 |
| 317 | 898222 | EST | ESTs | AA598602 | Hs.13434 |
| 318 | 1636741 | ESTs | ESTs | AI017846 | Hs.169539 |
| 319 | 113206 | EST | ESTs, Highly similar to ARGINYL- | T83996 | Hs.15395 |
| | | | TRNA SYNTHETASE, | | |
| | | | MITOCHONDRIAL PRECURSOR | | |
| | | | [Saccharomyces cerevisiae] | | |
| 320 | 113206 | EST | ESTs, Highly similar to ARGINYL- | T83997 | Hs.15395 |
| | | | TRNA SYNTHETASE, | | |
| | | | MITOCHONDRIAL PRECURSOR | | |
| | | | [Saccharomyces cerevisiae] | | |
| 321 | 825386 | ATP5JD | ESTs, Highly similar to ATP | AA504246 | Hs.64593 |
| | | | SYNTHASE D CHAIN, | | |
| | | | MITOCHONDRIAL [Bos taurus] | | |
| 322 | 782439 | ATP5I | ESTs, Highly similar to ATP | AA431433 | Hs.85539 |
| | | | SYNTHASE E CHAIN, | | |
| | | | MITOCHONDRIAL [Cricetulus | | |
| | | | longicaudatus] | | |
| 323 | 782439 | ATP5I | ESTs, Highly similar to ATP | AA431836 | Hs.85539 |
| | | | SYNTHASE E CHAIN, | | |
| | | | MITOCHONDRIAL [Cricetulus | | |
| | | | longicaudatus] | | |
| 324 | 434968 | ATP5E | ESTs, Highly similar to ATP | AA700688 | Hs.177530 |
| | | | SYNTHASE EPSILON CHAIN, | | |
| | | | MITOCHONDRIAL PRECURSOR [Bos | | |
| | | | taurus] | | |
| 325 | 82874 | EST | ESTs, Highly similar to ATPASE | T69273 | Hs.241336 |
| | | | INHIBITOR, MITOCHONDRIAL | | |
| | | | PRECURSOR [Rattus norvegicus] | | |
| 326 | 82874 | EST | ESTs, Highly similar to ATPASE | T69348 | Hs.241336 |
| | | | INHIBITOR, MITOCHONDRIAL | | |
| | | | PRECURSOR [Rattus norvegicus] | | |
| 327 | 290753 | CS | ESTs, Highly similar to CITRATE | N67639 | Hs.239760 |
| | | | SYNTHASE, MITOCHONDRIAL | | |
| | | | PRECURSOR [Sus scrofa] | | |
| 328 | 290753 | CS | ESTs, Highly similar to CITRATE | W01297 | Hs.239760 |
| | | | SYNTHASE, MITOCHONDRIAL | | |
| | | | PRECURSOR [Sus scrofa] | | |
| 329 | 731308 | CS | ESTs, Highly similar to CITRATE | AA416759 | Hs.239760 |
| | | | SYNTHASE, MITOCHONDRIAL | | |
| | | | PRECURSOR [Sus scrofa] | | |
| 330 | 731308 | CS | ESTs, Highly similar to CITRATE | AA416746 | Hs.239760 |
| | | | SYNTHASE, MITOCHONDRIAL | | |
| | | | PRECURSOR [Sus scrofa] | | |
| 331 | 283943 | EST | ESTs, Highly similar to ELONGATION | N50802 | Hs.41066 |
| | | | FACTOR G, MITOCHONDRIAL | | |
| | | | PRECURSOR [Rattus norvegicus] | | |
| 332 | 283943 | EST | ESTs, Highly similar to ELONGATION | N55159 | Hs.41066 |
| | | | FACTOR G, MITOCHONDRIAL | | |
| | | | PRECURSOR [Rattus norvegicus] | | |
| 333 | 359723 | EST | ESTs, Highly similar to ELONGATION | AA011122 | Hs.41066 |
| | | | FACTOR G, MITOCHONDRIAL | | |
| | | | PRECURSOR [Rattus norvegicus] | | |
| 334 | 359723 | EST | ESTs, Highly similar to ELONGATION | AA010761 | Hs.41066 |
| | | | FACTOR G, MITOCHONDRIAL | | |
| | | | PRECURSOR [Rattus norvegicus] | | |
| 335 | 430733 | EST | ESTs, Highly similar to | AA677960 | Hs.3585 |
| | | | HYPOTHETICAL 16.5 KD PROTEIN | | |
| | | | IN PAS8-EGT2 INTERGENIC REGION | | |
| | | | [Saccharomyces cerevisiae] | | |
| 336 | 1114960 | ETFDH | ESTs, Highly similar to | AA602015 | Hs.30661 |
| | | | HYPOTHETICAL 29.2 KD PROTEIN | | |
| | | | IN PHD1-PTM1 INTERGENIC | | |
| | | | REGION [Saccharomyces cerevisiae] | | |
| 337 | 1030791 | EST | ESTs, Highly similar to | AA609009 | Hs.63304 |
| | | | HYPOTHETICAL 44.9 KD PROTEIN | | |
| | | | IN ERG7-NMD2 INTERGENIC | | |
| | | | REGION [Saccharomyces cerevisiae] | | |
| 338 | 950700 | PP | ESTs, Highly similar to INORGANIC | AA608572 | Hs.184011 |
| | | | PYROPHOSPHATASE [Bos taurus] | | |
| 339 | 322218 | EST | ESTs, Highly similar to ISOLEUCYL- | W37993 | Hs.55609 |
| | | | TRNA SYNTHETASE, | | |
| | | | MITOCHONDRIAL [Saccharomyces | | |
| | | | cerevisiae] | | |
| 340 | 322218 | EST | ESTs, Highly similar to ISOLEUCYL- | W37992 | Hs.55609 |
| | | | TRNA SYNTHETASE, | | |
| | | | MITOCHONDRIAL [Saccharomyces | | |
| | | | cerevisiae] | | |
| 341 | 417801 | LOC51264 | ESTs, Highly similar to | W88752 | Hs.7736 |
| | | | MITOCHONDRIAL 60S RIBOSOMAL | | |
| | | | PROTEIN L2 PRECURSOR | | |
| | | | [Saccharomyces cerevisiae] | | |
| 342 | 417801 | LOC51264 | ESTs, Highly similar to | W88848 | Hs.7736 |
| | | | MITOCHONDRIAL 60S RIBOSOMAL | | |
| | | | PROTEIN L2 PRECURSOR | | |
| | | | [Saccharomyces cerevisiae] | | |
| 343 | 753602 | EST | ESTs, Highly similar to | AA479944 | Hs.42484 |
| | | | MITOCHONDRIAL CARRIER | | |
| | | | PROTEIN RIM2 [Saccharomyces | | |
| | | | cerevisiae] | | |
| 344 | 753602 | EST | ESTs, Highly similar to | AA478847 | Hs.42484 |
| | | | MITOCHONDRIAL CARRIER | | |
| | | | PROTEIN RIM2 [Saccharomyces | | |
| | | | cerevisiae] | | |
| 345 | 629916 | TIM17B | ESTs, Highly similar to | AA219179 | Hs.19105 |
| | | | MITOCHONDRIAL IMPORT INNER | | |
| | | | MEMBRANE TRANSLOCASE | | |
| | | | SUBUNIT TIM17 [Saccharomyces | | |
| | | | cerevisiae] | | |
| 346 | 629916 | TIM17B | ESTs, Highly similar to | AA219178 | Hs.19105 |
| | | | MITOCHONDRIAL IMPORT INNER | | |
| | | | MEMBRANE TRANSLOCASE | | |
| | | | SUBUNIT TIM17 [Saccharomyces | | |
| | | | cerevisiae] | | |
| 347 | 191826 | EST | ESTs, Highly similar to | H40449 | Hs.34401 |
| | | | MITOCHONDRIAL RNA SPLICING | | |
| | | | PROTEIN MRS3 [Saccharomyces | | |
| | | | cerevisiae] | | |
| 348 | 191826 | EST | ESTs, Highly similar to | H40448 | Hs.34401 |
| | | | MITOCHONDRIAL RNA SPLICING | | |
| | | | PROTEIN MRS3 [Saccharomyces | | |
| | | | cerevisiae] | | |
| 349 | 70201 | EST | ESTs, Highly similar to | T50082 | Hs.34401 |
| | | | MITOCHONDRIAL RNA SPLICING | | |
| | | | PROTEIN MSR4 [Saccharomyces | | |
| | | | cerevisiae] | | |
| 350 | 70201 | EST | ESTs, Highly similar to | T50019 | Hs.34401 |
| | | | MITOCHONDRIAL RNA SPLICING | | |
| | | | PROTEIN MSR4 [Saccharomyces | | |
| | | | cerevisiae] | | |
| 351 | 488386 | EST | ESTs, Highly similar to | AA046639 | Hs.34401 |
| | | | MITOCHONDRIAL RNA SPLICING | | |
| | | | PROTEIN MSR4 [Saccharomyces | | |
| | | | cerevisiae] | | |
| 352 | 488386 | EST | ESTs, Highly similar to | AA046778 | Hs.34401 |
| | | | MITOCHONDRIAL RNA SPLICING | | |
| | | | PROTEIN MSR4 [Saccharomyces | | |
| | | | cerevisiae] | | |
| 353 | 611467 | NDUFS6 | ESTs, Highly similar to | AA176453 | Hs.49767 |
| | | | MITOCHONDRIAL TRIFUNCTONAL | | |
| | | | ENZYME ALPHA SUBUNIT | | |
| | | | PRECURSOR [Homo sapiens] | | |
| 354 | 611467 | NDUFS6 | ESTs, Highly similar to | AA176931 | Hs.49767 |
| | | | MITOCHONDRIAL TRIFUNCTONAL | | |
| | | | ENZYME ALPHA SUBUNIT | | |
| | | | PRECURSOR [Homo sapiens] | | |
| 355 | 179336 | SDHA | ESTs, Highly similar to SUCCINATE | H50345 | Hs.469 |
| | | | DEHYDROGENASE [Homo sapiens] | | |
| 356 | 179336 | SDHA | ESTs, Highly similar to SUCCINATE | H50378 | Hs.469 |
| | | | DEHYDROGENASE [Homo sapiens] | | |
| 357 | 843335 | SUCLG1 | ESTs, Highly similar to SUCCINYL- | AA485965 | Hs.7043 |
| | | | COA LIGASE [Rattus norvegicus] | | |
| 358 | 843335 | SUCLG1 | ESTs, Highly similar to SUCCINYL- | AA489575 | Hs.7043 |
| | | | COA LIGASE [Rattus norvegicus] | | |
| 359 | 825229 | LOC51017 | ESTs, Highly similar to CGI-113 protein | AA504139 | Hs.19077 |
| | | | [H. sapiens] | | |
| 360 | 825229 | LOC51017 | ESTs, Highly similar to CGI-113 protein | AA504401 | Hs.19077 |
| | | | [H. sapiens] | | |
| 361 | 814271 | Est | ESTs, Highly similar to CGI-116 protein | AA459002 | Hs.18885 |
| | | | [H. sapiens] | | |
| 362 | 814271 | Est | ESTs, Highly similar to CGI-116 protein | AA459222 | Hs.18885 |
| | | | [H. sapiens] | | |
| 363 | 811062 | LOC51629 | ESTs, Highly similar to CGI-69 protein | AA485441 | Hs.237924 |
| | | | [H. sapiens] | | |
| 364 | 811062 | LOC51629 | ESTs, Highly similar to CGI-69 protein | AA485607 | Hs.237924 |
| | | | [H. sapiens] | | |
| 365 | 417803 | EST | ESTs, Highly similar to hypothetical | W88753 | Hs.166406 |
| | | | protein [H. sapiens] | | |
| 366 | 417803 | EST | ESTs, Highly similar to hypothetical | W88859 | Hs.166406 |
| | | | protein [H. sapiens] | | |
| 367 | 878316 | ESTs | ESTs, Highly similar to small zinc finger- | AA670296 | Hs.109571 |
| | | | like protein [H. sapiens] | | |
| 368 | 504689 | EST | ESTs, Moderately similar to 3- | AA149172 | Hs.55781 |
| | | | OXOACYL-[ACYL-CARRIER- | | |
| | | | PROTEIN] SYNTHASE II [Escherichia | | |
| | | | coli] | | |
| 369 | 504689 | EST | ESTs, Moderately similar to 3- | AA149171 | Hs.55781 |
| | | | OXOACYL-[ACYL-CARRIER- | | |
| | | | PROTEIN] SYNTHASE II [Escherichia | | |
| | | | coli] | | |
| 370 | 238907 | D6S52E | ESTs, Moderately similar to ABC1 | H67876 | Hs.243960 |
| | | | PROTEIN PRECURSOR | | |
| | | | [Saccharomyces cerevisiae] | | |
| 371 | 238907 | D6S52E | ESTs, Moderately similar to ABC1 | H67202 | Hs.243960 |
| | | | PROTEIN PRECURSOR | | |
| | | | [Saccharomyces cerevisiae] | | |
| 372 | 435314 | EST | ESTs, Moderately similar to 5- | AA699919 | Hs.114018 |
| | | | AMINOLEVULINIC ACID SYNTHASE | | |
| | | | MITOCHONDRIAL PRECURSOR, | | |
| | | | ERYTHROID-SPECIFIC [H. sapiens] | | |
| 373 | 839027 | EST | ESTs, Moderately similar to CGI-24 | AA487499 | |
| | | | protein [H. sapiens] | | |
| 374 | 839027 | EST | ESTs, Moderately similar to CGI-24 | AA487715 | |
| | | | protein [H. sapiens] | | |
| 375 | 321354 | EST | ESTs, Moderately similar to MSG1- | W32403 | Hs.18349 |
| | | | related protein [H. sapiens] | | |
| 376 | 321354 | EST | ESTs, Moderately similar to MSG1- | W32980 | Hs.18349 |
| | | | related protein [H. sapiens] | | |
| 377 | 824911 | EST | ESTs, Weakly similar to/prediction | AA489022 | Hs.5080 |
| 378 | 824911 | EST | ESTs, Weakly similar to/prediction | AA489118 | Hs.5080 |
| 379 | 85384 | EST | ESTs, Weakly similar to anon2A5 | T71965 | Hs.10964 |
| | | | [D. melanogaster] | | |
| 380 | 85384 | EST | ESTs, Weakly similar to anon2A5 | T72105 | Hs.10964 |
| | | | [D. melanogaster] | | |
| 381 | 757265 | EST | ESTs, Weakly similar to aralar1 | AA426113 | Hs.183047 |
| | | | [H. sapiens] | | |
| 382 | 490753 | FLJ20420 | ESTs, Weakly similar to head-elevated | AA133166 | Hs.6693 |
| | | | expression in 0.9 kb [D. melanogaster] | | |
| 383 | 343555 | EST | ESTs, Weakly similar to mitochondrial | W69379 | Hs.62669 |
| | | | inner membrane protease 1 [S. cerevisiae] | | |
| 384 | 343555 | EST | ESTs, Weakly similar to mitochondrial | W69378 | Hs.62669 |
| | | | inner membrane protease 1 [S. cerevisiae] | | |
| 385 | 198312 | KIAA0719 | ESTs, Weakly similar to | R94191 | Hs.21198 |
| | | | MITOCHONDRIAL PRECURSOR | | |
| | | | PROTEINS IMPORT RECEPTOR | | |
| | | | [Neurospora crassa] | | |
| 386 | 198312 | KIAA0719 | ESTs, Weakly similar to | R94290 | Hs.21198 |
| | | | MITOCHONDRIAL PRECURSOR | | |
| | | | PROTEINS IMPORT RECEPTOR | | |
| | | | [Neurospora crassa] | | |
| 387 | 511257 | KIAA0719 | ESTs, Weakly similar to | AA088722 | Hs.21198 |
| | | | MITOCHONDRIAL PRECURSOR | | |
| | | | PROTEINS IMPORT RECEPTOR | | |
| | | | [Neurospora crassa] | | |
| 388 | 511257 | KIAA0719 | ESTs, Weakly similar to | AA088799 | Hs.21198 |
| | | | MITOCHONDRIAL PRECURSOR | | |
| | | | PROTEINS IMPORT RECEPTOR | | |
| | | | [Neurospora crassa] | | |
| 389 | 324651 | EST | ESTs, Weakly similar to | W47099 | Hs.19513 |
| | | | MITOCHONDRIAL RESPIRATORY | | |
| | | | FUNCTION PROTEIN 1 | | |
| | | | [Saccharomyces cerevisiae] | | |
| 390 | 324651 | EST | ESTs, Weakly similar to | W47223 | Hs.19513 |
| | | | MITOCHONDRIAL RESPIRATORY | | |
| | | | FUNCTION PROTEIN 1 | | |
| | | | [Saccharomyces cerevisiae] | | |
| 391 | 429222 | EST | ESTs, Weakly similar to MSF1 | AA004210 | Hs.3945 |
| | | | PROTEIN [S. cerevisiae] | | |
| 392 | 429222 | EST | ESTs, Weakly similar to MSF1 | AA007411 | Hs.3945 |
| | | | PROTEIN [S. cerevisiae] | | |
| 393 | 754537 | EST | ESTs, Weakly similar to myosin beta | AA406291 | |
| | | | heavy chain, cardiac and skeletal muscle | | |
| | | | [H. sapiens] | | |
| 394 | 754537 | EST | ESTs, Weakly similar to myosin beta | AA421979 | |
| | | | heavy chain, cardiac and skeletal muscle | | |
| | | | [H. sapiens] | | |
| 395 | 897557 | EST | ESTs, Weakly similar to myosin beta | AA497024 | Hs.179817 |
| | | | heavy chain, cardiac and skeletal muscle | | |
| | | | [H. sapiens] | | |
| 396 | 897557 | EST | ESTs, Weakly similar to myosin beta | AA489606 | Hs.179817 |
| | | | heavy chain, cardiac and skeletal muscle | | |
| | | | [H. sapiens] | | |
| 397 | 812169 | EST | ESTs, Weakly similar to PROBABLE | AA456042 | Hs.7807 |
| | | | MITOCHONDRIAL 40S RIBOSOMAL | | |
| | | | PROTEIN S5 [S. cerevisiae] | | |
| 398 | 208531 | EST | ESTs, Weakly similar to PUTATIVE | H61979 | Hs.7994 |
| | | | MITOCHONDRIAL CARRIER | | |
| | | | YBR291C [Saccharomyces cerevisiae] | | |
| 399 | 208531 | EST | ESTs, Weakly similar to PUTATIVE | H61978 | Hs.7994 |
| | | | MITOCHONDRIAL CARRIER | | |
| | | | YBR291C [Saccharomyces cerevisiae] | | |
| 400 | 435509 | tRNAleu | ESTs, Weakly similar to similar to | AA701379 | |
| | | | leucyl-tRNA synthetase [C. elegans] | | |
| 401 | 43662 | EST | ESTs, Weakly similar to similar to | H05645 | Hs.21262 |
| | | | mitochrondrial carrier protein [C. elegans] | | |
| 402 | 43662 | EST | ESTs, Weakly similar to similar to | H05644 | Hs.21262 |
| | | | mitochrondrial carrier protein [C. elegans] | | |
| 403 | 53385 | EST | ESTs, Weakly similar to Similar to | R16231 | Hs.106620 |
| | | | NAD(P) transhydrogenase, mitochondrial | | |
| | | | [C. elegans] | | |
| 404 | 53385 | EST | ESTs, Weakly similar to Similar to | R16232 | Hs.106620 |
| | | | NAD(P) transhydrogenase, mitochondrial | | |
| | | | [C. elegans] | | |
| 405 | 84880 | EST | ESTs, Weakly similar to VISC PROTEIN | T74882 | Hs.12239 |
| | | | [Escherichia coli] | | |
| 406 | 84880 | EST | ESTs, Weakly similar to VISC PROTEIN | T74939 | Hs.12239 |
| | | | [Escherichia coli] | | |
| 407 | 845419 | FANCA | Fanconi anemia, complementation group A | AA644129 | Hs.86297 |
| 408 | 624634 | FDX1 | ferredoxin 1 | AA187349 | Hs.744 |
| 409 | 624634 | FDX1 | ferredoxin 1 | AA188427 | Hs.744 |
| 410 | 365149 | FECH | ferrochelatase (protoporphyria) | AA025142 | Hs.26 |
| 411 | 365149 | FECH | ferrochelatase (protoporphyria) | AA025157 | Hs.26 |
| 412 | 1469138 | FGA | Fibrinogen, A alpha polypeptide | AA865707 | Hs.90765 |
| 413 | 131839 | FOLR1 | folate receptor 1 (adult) | R24635 | Hs.73769 |
| 414 | 131839 | FOLR1 | folate receptor 1 (adult) | R24530 | Hs.73769 |
| 415 | 146605 | FPRL1 | formyl peptide receptor-like 1 | R80041 | Hs.99855 |
| 416 | 146605 | FPRL1 | formyl peptide receptor-like 1 | R79948 | Hs.99855 |
| 417 | 490600 | FOSL2 | FOS-like antigen 2 | AA101617 | Hs.155210 |
| 418 | 490600 | FOSL2 | FOS-like antigen 2 | AA101616 | Hs.155210 |
| 419 | 279790 | FMR1 | Fragile X mental retardation 1 | N48355 | Hs.89764 |
| 420 | 279790 | FMR1 | Fragile X mental retardation 1 | N49132 | Hs.89764 |
| 421 | 669419 | FRDA | Friedreich ataxia | AA253413 | Hs.95998 |
| 422 | 669419 | FRDA | Friedreich ataxia | AA253388 | Hs.95998 |
| 423 | 469412 | FH | Fumarate hydratase | AA026917 | Hs.75653 |
| 424 | 469412 | FH | Fumarate hydratase | AA026918 | Hs.75653 |
| 425 | 842839 | FUS | fusion, derived from t(12; 16) malignant | AA486284 | |
| | | | liposarcoma | | |
| 426 | 842839 | FUS | fusion, derived from t(12; 16) malignant | AA489305 | |
| | | | liposarcoma | | |
| 427 | 81289 | ACTG2 | Gamma-actin, enteric smooth muscle | T60048 | Hs.77443 |
| | | | form | | |
| 428 | 288663 | GJB1 | gap junction protein, beta 1, 32 kD | N62394 | |
| | | | (connexin 32, Charcot-Marie-Tooth | | |
| | | | neuropathy, X-linked) | | |
| 429 | 288663 | GJB1 | gap junction protein, beta 1, 32 kD | N79360 | |
| | | | (connexin 32, Charcot-Marie-Tooth | | |
| | | | neuropathy, X-linked) | | |
| 430 | 2338827 | GCDH_HUMAN | GCDH_HUMAN | AI693352 | |
| 431 | 66534 | GCKR | glucokinase (hexokinase 4) regulatory | T67007 | Hs.89771 |
| | | | protein | | |
| 432 | 66534 | GCKR | glucokinase (hexokinase 4) regulatory | T67006 | Hs.89771 |
| | | | protein | | |
| 433 | 471498 | GNS | glucosamine (N-acetyl)-6-sulfatase | AA035347 | Hs.2703 |
| | | | (Sanfilippo disease IIID) | | |
| 434 | 122636 | G6PC | Glucose-6-phosphatase | T98886 | Hs.242 |
| 435 | 122636 | G6PC | Glucose-6-phosphatase | T98887 | Hs.242 |
| 436 | 166236 | G6PD | glucose-6-phosphate dehydrogenase | R87497 | |
| 437 | 166236 | G6PD | glucose-6-phosphate dehydrogenase | R88192 | |
| 438 | 753775 | GMPR | Glucose-6-phosphate dehydrogenase | AA406242 | Hs.1435 |
| 439 | 753775 | GMPR | Glucose-6-phosphate dehydrogenase | AA410375 | Hs.1435 |
| 440 | 361565 | GLUD1 | glutamate dehydrogenase 1 | AA018372 | Hs.77508 |
| 441 | 361565 | GLUD1 | glutamate dehydrogenase 1 | AA017175 | Hs.77508 |
| 442 | 51702 | GOT1 | glutamic-oxaloacetic transaminase 1, | H22856 | Hs.597 |
| | | | soluble (aspartate aminotransferase 1) | | |
| 443 | 51702 | GOT1 | glutamic-oxaloacetic transaminase 1, | H22855 | Hs.597 |
| | | | soluble (aspartate aminotransferase 1) | | |
| 444 | 841370 | GOT2 | Glutamic-oxaloacetic transaminase 2, | AA487739 | Hs.170197 |
| | | | mitochondrial (aspartate aminotransferase | | |
| | | | 2) | | |
| 445 | 841370 | GOT2 | Glutamic-oxaloacetic transaminase 2, | AA487521 | Hs.170197 |
| | | | mitochondrial (aspartate aminotransferase | | |
| | | | 2) | | |
| 446 | 810999 | GPX1 | glutathione peroxidase 1 | AA485362 | Hs.76686 |
| 447 | 810999 | GPX1 | glutathione peroxidase 1 | AA485517 | Hs.76686 |
| 448 | 587847 | GPX2 | Glutathione peroxidase 2, gastrointestinal | AA135289 | Hs.2704 |
| 449 | 587847 | GPX2 | Glutathione peroxidase 2, gastrointestinal | AA135152 | Hs.2704 |
| 450 | 855523 | GPX3 | Glutathione peroxidase 3 (plasma) | AA664180 | Hs.172153 |
| 451 | 1555659 | GPX3 | glutathione peroxidase 3 (plasma) | AI147534 | Hs.172153 |
| 452 | 448619 | GSR | Glutathione reductase | AA777289 | Hs.121524 |
| 453 | 811792 | GSS | Glutathione synthetase | AA463458 | Hs.82327 |
| 454 | 628418 | GPD1 | glycerol-3-phosphate dehydrogenase 1 | AA192547 | Hs.255718 |
| | | | (soluble) | | |
| 455 | 628418 | GPD1 | glycerol-3-phosphate dehydrogenase 1 | AA193116 | Hs.255718 |
| | | | (soluble) | | |
| 456 | 428756 | GPD2 | glycerol-3-phosphate dehydrogenase 2 | AA005219 | Hs.93201 |
| | | | (mitochondrial) | | |
| 457 | 428756 | GPD2 | glycerol-3-phosphate dehydrogenase 2 | AA005218 | Hs.93201 |
| | | | (mitochondrial) | | |
| 458 | 42558 | GATM | glycine amidinotransferase (L- | R61229 | Hs.75335 |
| | | | arginine: glycine amidinotransferase) | | |
| 459 | 42558 | GATM | glycine amidinotransferase (L- | R61228 | Hs.75335 |
| | | | arginine: glycine amidinotransferase) | | |
| 460 | 134748 | GCSH | glycine cleavage system protein H | R28294 | Hs.77631 |
| | | | (aminomethyl carrier) | | |
| 461 | 134748 | GCSH | glycine cleavage system protein H | R28081 | Hs.77631 |
| | | | (aminomethyl carrier) | | |
| 462 | 248261 | GLDC | glycine dehydrogenase (decarboxylating; | N78083 | Hs.27 |
| | | | glycine decarboxylase, glycine cleavage | | |
| | | | system protein P) | | |
| 463 | 248261 | GLDC | glycine dehydrogenase (decarboxylating; | N58494 | Hs.27 |
| | | | glycine decarboxylase, glycine cleavage | | |
| | | | system protein P) | | |
| 464 | 45632 | GYS1 | glycogen synthase 1 (muscle) | H08446 | Hs.772 |
| 465 | 45632 | GYS1 | glycogen synthase 1 (muscle) | H08732 | Hs.772 |
| 466 | 245920 | GYS2 | glycogen synthase 2 (liver) | N72934 | Hs.82614 |
| 467 | 245920 | GYS2 | glycogen synthase 2 (liver) | N52282 | Hs.82614 |
| 468 | 1502027 | MGE1 | GrpE-like protein cochaperone mRNA | AA887226 | |
| 469 | 2250688 | GT | GT | AI659294 | |
| 470 | 841008 | GBP1 | Guanylate binding protein 1, interferon- | AA486849 | Hs.62661 |
| | | | inducible, 67 kD | | |
| 471 | 841008 | GBP1 | Guanylate binding protein 1, interferon- | AA486850 | Hs.62661 |
| | | | inducible, 67 kD | | |
| 472 | 796341 | CLCN3 | H. sapiens RNA for CLCN3 | AA461332 | Hs.174139 |
| 473 | 796341 | CLCN3 | H. sapiens RNA for CLCN3 | AA459750 | Hs.174139 |
| 474 | 300237 | No Data | H. sapiens DAP-3 mRNA | N78611 | |
| 475 | 300237 | No Data | H. sapiens DAP-3 mRNA | W07332 | |
| 476 | 341246 | CLPP | H. sapiens mRNA for CLPP | W58658 | Hs.74362 |
| 477 | 341246 | CLPP | H. sapiens mRNA for CLPP | W58337 | Hs.74362 |
| 478 | 1031185 | MCSP | H. sapiens mRNA for mitochondrial | AA609976 | Hs.111850 |
| | | | capsule selenoprotein | | |
| 479 | 259842 | PMPCB | H. sapiens mRNA for M-phase | N29844 | Hs.184211 |
| | | | phosphoprotein, mpp11 | | |
| 480 | 259842 | PMPCB | H. sapiens mRNA for M-phase | N57262 | Hs.184211 |
| | | | phosphoprotein, mpp11 | | |
| 481 | 810942 | IDH3G | H. sapiens mRNA for NAD (H)-specific | AA459380 | Hs.75253 |
| | | | isocitrate dehydrogenase gamma subunit | | |
| | | | precursor | | |
| 482 | 810942 | IDH3G | H. sapiens mRNA for NAD (H)-specific | AA459606 | Hs.75253 |
| | | | isocitrate dehydrogenase gamma subunit | | |
| | | | precursor | | |
| 483 | 530282 | NDUFA1 | H. sapiens mRNA for NADH | AA111999 | Hs.74823 |
| | | | dehydrogenase | | |
| 484 | 530282 | NDUFA1 | H. sapiens mRNA for NADH | AA083784 | Hs.74823 |
| | | | dehydrogenase | | |
| 485 | 813815 | NR1I3 | H. sapiens mRNA for orphan nuclear | AA447727 | Hs.83623 |
| | | | hormone receptor | | |
| 486 | 813815 | NR1I3 | H. sapiens mRNA for orphan nuclear | AA447889 | Hs.83623 |
| | | | hormone receptor | | |
| 487 | 810959 | ARHGDIA | H. sapiens mRNA for rho GDP- | AA459400 | Hs.159161 |
| | | | dissociation Inhibitor 1 | | |
| 488 | 810959 | ARHGDIA | H. sapiens mRNA for rho GDP- | AA459625 | Hs.159161 |
| | | | dissociation Inhibitor 1 | | |
| 489 | 506032 | TIM17 | H. sapiens mRNA for TIM17 preprotein | AA708446 | Hs.20716 |
| | | | translocase | | |
| 490 | 814526 | EST | H. sapiens seb4D mRNA | AA459363 | |
| 491 | 814526 | EST | H. sapiens seb4D mRNA | AA459588 | |
| 492 | 814460 | SURF5 | H. sapiens SURF-5 mRNA | AA459247 | Hs.78354 |
| 493 | 814460 | SURF5 | H. sapiens SURF-5 mRNA | AA459472 | Hs.78354 |
| 494 | 1671299 | HRK | harakiri, BCL2-interacting protein | AI083676 | Hs.87247 |
| | | | (contains only BH3 domain) | | |
| 495 | 1417985 | EST | heat shock 10 kD protein 1 (chaperonin | AA878786 | Hs.203620 |
| | | | 10) | | |
| 496 | 1417985 | EST | heat shock 10 kD protein 1 (chaperonin | AI791247 | Hs.203620 |
| | | | 10) | | |
| 497 | 1870305 | HSPB2 | heat shock 27 kD protein 2 | AI245337 | Hs.78846 |
| 498 | 1354618 | HSPF2 | heat shock 40 kD protein 2 | AA830392 | Hs.172847 |
| 499 | 755904 | HSPA1A | HEAT SHOCK 70 KD PROTEIN 1 | AA496544 | Hs.8997 |
| 500 | 1604342 | HSPA9B | heat shock 70 kD protein 9B (mortalin-2) | AA987644 | Hs.3069 |
| 501 | 884719 | HSPA10 | HEAT SHOCK COGNATE 71 KD | AA629567 | Hs.180414 |
| | | | PROTEIN | | |
| 502 | 253009 | HSPCA | HEAT SHOCK PROTEIN HSP 90- | H88540 | Hs.180532 |
| | | | ALPHA | | |
| 503 | 253009 | HSPCA | HEAT SHOCK PROTEIN HSP 90- | H88588 | Hs.180532 |
| | | | ALPHA | | |
| 504 | 824031 | HSJ2 | heat shock protein, DNAJ-like 2 | AA490946 | |
| 505 | 824031 | HSJ2 | heat shock protein, DNAJ-like 2 | AA491132 | |
| 506 | 1606894 | HSF4 | heat shock transcription factor 4 | AA999776 | Hs.75486 |
| 507 | 562101 | HERC1 | hect (homologous to the E6-AP (UBE3A) | AA211496 | Hs.255561 |
| | | | carboxyl terminus) domain and RCC1 | | |
| | | | (CHC1)-like domain (RLD) 1 | | |
| 508 | 562101 | HERC1 | hect (homologous to the E6-AP (UBE3A) | AA211544 | Hs.255561 |
| | | | carboxyl terminus) domain and RCC1 | | |
| | | | (CHC1)-like domain (RLD) 1 | | |
| 509 | 85259 | HMOX1 | heme oxygenase (decycling) 1 | T71757 | Hs.202833 |
| 510 | 85259 | HMOX1 | heme oxygenase (decycling) 1 | T71606 | Hs.202833 |
| 511 | 745116 | HMOX2 | Heme oxygenase (decycling) 2 | AA626370 | Hs.83853 |
| 512 | 433307 | HNF6A | hepatocyte nuclear factor 6, alpha | AA699732 | Hs.73168 |
| 513 | 840158 | HK1 | Hexokinase 1 | AA485271 | Hs.118625 |
| 514 | 840158 | HK1 | Hexokinase 1 | AA485272 | Hs.118625 |
| 515 | 1338040 | C46157 | HEXOKINASE D, LIVER ISOZYMES | AA811712 | |
| 516 | 211780 | No Data | Hexosaminidase B (beta polypeptide) | H71868 | |
| 517 | 211780 | No Data | Hexosaminidase B (beta polypeptide) | H71081 | |
| 518 | 767441 | HEXB | hexosaminidase B (beta polypeptide) | AA417946 | Hs.51043 |
| 519 | 767441 | HEXB | hexosaminidase B (beta polypeptide) | AA418121 | Hs.51043 |
| 520 | 970591 | HMG1 | High-mobility group (nonhistone | AA683085 | Hs.189509 |
| | | | chromosomal) protein 1 | | |
| 521 | 363103 | HMG2 | High-mobility group (nonhistone | AA019511 | Hs.80684 |
| | | | chromosomal) protein 2 | | |
| 522 | 363103 | HMG2 | High-mobility group (nonhistone | AA019203 | Hs.80684 |
| | | | chromosomal) protein 2 | | |
| 523 | 80924 | HO3 | histidyl-tRNA synthetase | T70104 | Hs.77798 |
| 524 | 80924 | HO3 | histidyl-tRNA synthetase | T70037 | Hs.77798 |
| 525 | 812246 | HLCS | holocarboxylase synthetase (biotin- | AA455043 | Hs.79375 |
| | | | [proprionyl-Coenzyme A-carboxylase | | |
| | | | (ATP-hydrolysing)] ligase) | | |
| 526 | 712577 | HCCS | HOLOCYTOCHROME C-TYPE | AA281548 | Hs.88859 |
| | | | SYNTHETASE | | |
| 527 | 712577 | HCCS | HOLOCYTOCHROME C-TYPE | AA281549 | Hs.88859 |
| | | | SYNTHETASE | | |
| 528 | 611075 | HOXA1 | homeo box A1 | AA173231 | |
| 529 | 611075 | HOXA1 | homeo box A1 | AA173290 | |
| 530 | 244146 | APAF1 | Homo sapiens apoptotic protease | N51014 | Hs.77579 |
| | | | activating factor 1 (Apaf-1) mRNA, | | |
| | | | complete cds | | |
| 531 | 244146 | APAF1 | Homo sapiens apoptotic protease | N72045 | Hs.77579 |
| | | | activating factor 1 (Apaf-1) mRNA, | | |
| | | | complete cds | | |
| 532 | 288796 | BNIP2 | Homo sapiens BCL2/adenovirus E1B | N62514 | Hs.155596 |
| | | | 19 kD-interacting protein 2 (BNIP2) | | |
| | | | mRNA, complete cds | | |
| 533 | 432620 | NOD1 | Homo sapiens caspase recruitment | AA699441 | |
| | | | domain 4 (NOD1) mRNA | | |
| 534 | 853506 | 23956 Mrna | Homo sapiens clone 23956 mRNA, | AA663549 | Hs.8128 |
| | | | partial cds | | |
| 535 | 288888 | EST | Homo sapiens clone 640 unknown | N62617 | Hs.44563 |
| | | | mRNA, complete sequence | | |
| 536 | 288888 | EST | Homo sapiens clone 640 unknown | N78388 | Hs.44563 |
| | | | mRNA, complete sequence | | |
| 537 | 271102 | CCS | Homo sapiens copper chaperone for | N30404 | Hs.5002 |
| | | | superoxide dismutase (CCS) mRNA, | | |
| | | | complete cds | | |
| 538 | 489823 | COX17 | Homo sapiens COX17 mRNA, complete | AA099855 | Hs.16297 |
| | | | cds | | |
| 539 | 489823 | COX17 | Homo sapiens COX17 mRNA, complete | AA099320 | Hs.16297 |
| | | | cds | | |
| 540 | 487348 | DYMPLE | Homo sapiens dynamin-like protein | AA045529 | Hs.180628 |
| | | | mRNA, complete cds | | |
| 541 | 487348 | DYMPLE | Homo sapiens dynamin-like protein | AA040651 | Hs.180628 |
| | | | mRNA, complete cds | | |
| 542 | 359982 | BNIP3 | Homo sapiens E1B 19K/Bcl-2-binding | AA063521 | Hs.79428 |
| | | | protein Nip3 mRNA, nuclear gene | | |
| | | | encoding mitochondrial protein, complete | | |
| | | | cds | | |
| 543 | 359982 | BNIP3 | Homo sapiens E1B 19K/Bcl-2-binding | AA035669 | Hs.79428 |
| | | | protein Nip3 mRNA, nuclear gene | | |
| | | | encoding mitochondrial protein, complete | | |
| | | | cds | | |
| 544 | 395436 | HUEL | Homo sapiens embryonic lung protein | AA757427 | Hs.44053 |
| | | | (HUEL) mRNA, complete cds | | |
| 545 | 1472184 | HUEL | Homo sapiens embryonic lung protein | AA873264 | Hs.44053 |
| | | | (HUEL) mRNA, complete cds | | |
| 546 | 129644 | SSH3BP1 | Homo sapiens eps8 binding protein e3B1 | R16667 | Hs.24752 |
| | | | mRNA, complete cds | | |
| 547 | 129644 | SSH3BP1 | Homo sapiens eps8 binding protein e3B1 | R16666 | Hs.24752 |
| | | | mRNA, complete cds | | |
| 548 | 563574 | FRG1 | Homo sapiens FRG1 mRNA, complete | AA113339 | Hs.203772 |
| | | | cds | | |
| 549 | 563574 | FRG1 | Homo sapiens FRG1 mRNA, complete | AA112636 | Hs.203772 |
| | | | cds | | |
| 550 | 83279 | TIM23 | Homo sapiens inner mitochondrial | T68317 | Hs.11866 |
| | | | membrane translocase Tim23 (TIM23) | | |
| | | | mRNA, nuclear gene encoding | | |
| | | | mitochondrial protein, complete cds | | |
| 551 | 83279 | TIM23 | Homo sapiens inner mitochondrial | T68386 | Hs.11866 |
| | | | membrane translocase Tim23 (TIM23) | | |
| | | | mRNA, nuclear gene encoding | | |
| | | | mitochondrial protein, complete cds | | |
| 552 | 455123 | KIAA0429 | Homo sapiens KIAA0430 mRNA, | AA676805 | Hs.77694 |
| | | | complete cds | | |
| 553 | 300590 | APACD | Homo sapiens mRNA for ATP binding | N80741 | Hs.153884 |
| | | | protein, complete cds | | |
| 554 | 300590 | APACD | Homo sapiens mRNA for ATP binding | W07537 | Hs.153884 |
| | | | protein, complete cds | | |
| 555 | 129146 | COX7RP | Homo sapiens mRNA for COX7RP, | R10896 | Hs.30888 |
| | | | complete cds | | |
| 556 | 129146 | COX7RP | Homo sapiens mRNA for COX7RP, | R10947 | Hs.30888 |
| | | | complete cds | | |
| 557 | 745314 | HIRIPS | Homo sapiens mRNA for HIRA- | AA625581 | Hs.17368 |
| | | | interacting protein HIRIP5 | | |
| 558 | 810316 | KIAA0631 | Homo sapiens mRNA for KIAA0631 | AA464206 | Hs.75154 |
| | | | protein, partial cds | | |
| 559 | 810316 | KIAA0631 | Homo sapiens mRNA for KIAA0631 | AA464139 | Hs.75154 |
| | | | protein, partial cds | | |
| 560 | 490778 | QP-C | Homo sapiens mRNA for low molecular | AA133191 | Hs.3709 |
| | | | mass ubiquinone-binding protein, | | |
| | | | complete cds | | |
| 561 | 131653 | RPMS12 | Homo sapiens mRNA for mitochondrial | R23752 | Hs.9964 |
| | | | ribosomal protein S12 | | |
| 562 | 131653 | RPMS12 | Homo sapiens mRNA for mitochondrial | R23806 | Hs.9964 |
| | | | ribosomal protein S12 | | |
| 563 | 344825 | LAS | Homo sapiens mRNA for putative lipoic | W72965 | Hs.53531 |
| | | | acid synthetase, partial | | |
| 564 | 344825 | LAS | Homo sapiens mRNA for putative lipoic | W76202 | Hs.53531 |
| | | | acid synthetase, partial | | |
| 565 | 345621 | CXX1 | Homo sapiens mRNA for putatively | W72596 | Hs.255532 |
| | | | prenylated protein | | |
| 566 | 345621 | CXX1 | Homo sapiens mRNA for putatively | W76590 | Hs.255532 |
| | | | prenylated protein | | |
| 567 | 450574 | SCA7 | Homo sapiens mRNA for spinocerebellar | AA704255 | Hs.108447 |
| | | | ataxia 7 | | |
| 568 | 123474 | SCD | Homo sapiens mRNA for stearoyl-CoA | R00707 | Hs.119597 |
| | | | desaturase | | |
| 569 | 123474 | SCD | Homo sapiens mRNA for stearoyl-CoA | R00706 | Hs.119597 |
| | | | desaturase | | |
| 570 | 855890 | cDNA | Homo sapiens mRNA; cDNA | AA630320 | Hs.255914 |
| | | | DKFZp586C0722 (from clone | | |
| | | | DKFZp586C0722) | | |
| 571 | 770043 | NDUFV1 | Homo sapiens NADH: ubiquinone | AA427570 | Hs.7744 |
| | | | dehydrogenase 51 kDa subunit | | |
| | | | (NDUFV1) mRNA, nuclear gene | | |
| | | | encoding mitochondrial protein, complete | | |
| | | | cds | | |
| 572 | 770043 | NDUFV1 | Homo sapiens NADH: ubiquinone | AA427652 | Hs.7744 |
| | | | dehydrogenase 51 kDa subunit | | |
| | | | (NDUFV1) mRNA, nuclear gene | | |
| | | | encoding mitochondrial protein, complete | | |
| | | | cds | | |
| 573 | 859228 | IDH1 | Homo sapiens NADP-dependent | AA666366 | Hs.11223 |
| | | | isocitrate dehydrogenase (IDH) mRNA, | | |
| | | | complete cds | | |
| 574 | 124753 | ABCD4 | Homo sapiens peroxisomal membrane | R02189 | Hs.94395 |
| | | | protein 69 (PMP69) mRNA, complete cds | | |
| 575 | 293104 | PHYH | Homo sapiens peroxisomal phytanoyl- | N91990 | Hs.172887 |
| | | | CoA alpha-hydroxylase (PAHX) mRNA, | | |
| | | | complete cds | | |
| 576 | 293104 | PHYH | Homo sapiens peroxisomal phytanoyl- | N63845 | Hs.172887 |
| | | | CoA alpha-hydroxylase (PAHX) mRNA, | | |
| | | | complete cds | | |
| 577 | 1629264 | hTIM44 | Homo sapiens putative mitochondrial | AI003393 | Hs.123178 |
| | | | inner membrane protein import receptor | | |
| | | | (hTIM44) mRNA, nuclear gene encoding | | |
| | | | mitochondrial protein, complete cds | | |
| 578 | 399532 | RPA40 | Homo sapiens RNA polymerase I subunit | AA733038 | Hs.5409 |
| | | | hRPA39 mRNA, complete cds | | |
| 579 | 787938 | SLC4A4 | Homo sapiens sodium bicarbonate | AA452278 | Hs.5462 |
| | | | cotransporter (HNBC1) mRNA, complete | | |
| | | | cds | | |
| 580 | 138189 | WFS1 | Homo sapiens transmembrane protein | R53910 | Hs.26077 |
| | | | (WFS1) mRNA, complete cds | | |
| 581 | 138189 | WFS1 | Homo sapiens transmembrane protein | R53911 | Hs.26077 |
| | | | (WFS1) mRNA, complete cds | | |
| 582 | 266106 | YWHAE | Human 14-3-3 epsilon mRNA, complete | N21624 | Hs.79474 |
| | | | cds | | |
| 583 | 266106 | YWHAE | Human 14-3-3 epsilon mRNA, complete | N28863 | Hs.79474 |
| | | | cds | | |
| 584 | 45464 | AK2 | Human adenylate kinase 2 (adk2) mRNA, | H09730 | Hs.171811 |
| | | | complete cds | | |
| 585 | 45464 | AK2 | Human adenylate kinase 2 (adk2) mRNA, | H10488 | Hs.171811 |
| | | | complete cds | | |
| 586 | 795543 | AOE372 | Human antioxidant enzyme AOE37-2 | AA459663 | Hs.83383 |
| | | | mRNA, complete cds | | |
| 587 | 241481 | CASP10 | Human apoptotic cysteine protease Mch4 | H80712 | Hs.5353 |
| | | | (Mch4) mRNA, complete cds | | |
| 588 | 241481 | CASP10 | Human apoptotic cysteine protease Mch4 | H80711 | Hs.5353 |
| | | | (Mch4) mRNA, complete cds | | |
| 589 | 897774 | APRT | Human APRT gene for adenine | AA598510 | Hs.28914 |
| | | | phosphoribosyltransferase | | |
| 590 | 810552 | REA | Human B-cell receptor associated protein | AA464669 | Hs.7771 |
| | | | (hBAP) mRNA, partial cds | | |
| 591 | 810552 | REA | Human B-cell receptor associated protein | AA464567 | Hs.7771 |
| | | | (hBAP) mRNA, partial cds | | |
| 592 | 2326129 | BBC3 | Human Bcl-2 binding component 3 | AI688112 | Hs.87246 |
| | | | (bbc3) mRNA, partial cds | | |
| 593 | 795729 | BAD | Human Bcl-2 binding component 6 | AA460291 | Hs.76366 |
| | | | (bbc6) mRNA, complete cds | | |
| 594 | 795729 | BAD | Human Bcl-2 binding component 6 | AA461579 | Hs.76366 |
| | | | (bbc6) mRNA, complete cds | | |
| 595 | 814478 | BCL2A1 | Human Bcl-2 related (Bfl-1) mRNA, | AA459263 | Hs.227817 |
| | | | complete cds | | |
| 596 | 814478 | BCL2A1 | Human Bcl-2 related (Bfl-1) mRNA, | AA459491 | Hs.227817 |
| | | | complete cds | | |
| 597 | 212198 | TP53BP2 | Human Bcl2, p53 binding protein | H69153 | Hs.44585 |
| | | | Bbp/53BP2 (BBP/53BP2) mRNA, | | |
| | | | complete cds | | |
| 598 | 212198 | TP53BP2 | Human Bcl2, p53 binding protein | H69077 | Hs.44585 |
| | | | Bbp/53BP2 (BBP/53BP2) mRNA, | | |
| | | | complete cds | | |
| 599 | 432581 | Novel Gene | Human BRCA2 region, mRNA sequence | AA699390 | Hs.184938 |
| | | | CG012 | | |
| 600 | 433111 | BAC clone CIT987SK-A- | Human Chromosome 16 BAC clone | AA680407 | Hs.47278 |
| | | 735G6 | CIT987SK-A-735G6 | | |
| 601 | 782635 | NDUFAB1 | Human Chromosome 16 BAC clone | AA447569 | Hs.5556 |
| | | | CIT987SK-A-735G6 | | |
| 602 | 782635 | NDUFAB1 | Human Chromosome 16 BAC clone | AA448553 | Hs.5556 |
| | | | CIT987SK-A-735G6 | | |
| 603 | 669471 | 23589 mRNA | Human clone 23589 mRNA sequence | AA234889 | Hs.11506 |
| 604 | 669471 | 23589 mRNA | Human clone 23589 mRNA sequence | AA253479 | Hs.11506 |
| 605 | 771173 | 23732 mRNA | Human clone 23732 mRNA, partial cds | AA443497 | Hs.81281 |
| 606 | 771173 | 23732 mRNA | Human clone 23732 mRNA, partial cds | AA429483 | Hs.81281 |
| 607 | 745606 | 23759 mRNA | Human clone 23759 mRNA, partial cds | AA626336 | Hs.118666 |
| 608 | 323500 | CASP6 | Human cysteine protease Mch2 isoform | W45688 | Hs.3280 |
| | | | alpha (Mch2) mRNA, complete cds | | |
| 609 | 323500 | CASP6 | Human cysteine protease Mch2 isoform | W44316 | Hs.3280 |
| | | | alpha (Mch2) mRNA, complete cds | | |
| 610 | 71420 | CYP2C9 | Human cytochrome P4502C9 (CYP2C9) | T47787 | |
| | | | mRNA, clone 65 | | |
| 611 | 71420 | CYP2C9 | Human cytochrome P4502C9 (CYP2C9) | T47788 | |
| | | | mRNA, clone 65 | | |
| 612 | 754490 | SLC25A16 | Human GT mitochondrial solute carrier | AA411554 | Hs.180408 |
| | | | protein homologue mRNA, complete cds | | |
| 613 | 754490 | SLC25A16 | Human GT mitochondrial solute carrier | AA410572 | Hs.180408 |
| | | | protein homologue mRNA, complete cds | | |
| 614 | 1734348 | Go-alpha | Human guanine nucleotide-binding | AI188097 | Hs.169647 |
| | | | regulatory protein (Go-alpha) gene | | |
| 615 | 826204 | FLII | Human homolog of D. melanogaster | AA521453 | Hs.83849 |
| | | | flightless-I gene product mRNA, partial | | |
| | | | cds | | |
| 616 | 144777 | HAX1 | Human HS1 binding protein HAX-1 | R76263 | Hs.15318 |
| | | | mRNA, nuclear gene encoding | | |
| | | | mitochondrial protein, complete cds | | |
| 617 | 144777 | HAX1 | Human HS1 binding protein HAX-1 | R76544 | Hs.15318 |
| | | | mRNA, nuclear gene encoding | | |
| | | | mitochondrial protein, complete cds | | |
| 618 | 261481 | CUL3 | Human Hs-cul-3 mRNA, partial cds | H98621 | Hs.78946 |
| 619 | 261481 | CUL3 | Human Hs-cul-3 mRNA, partial cds | N25142 | Hs.78946 |
| 620 | 233581 | HIP2 | Human huntingtin interacting protein | H78483 | Hs.155485 |
| | | | (HIP2) mRNA, complete cds | | |
| 621 | 233581 | HIP2 | Human huntingtin interacting protein | H78385 | Hs.155485 |
| | | | (HIP2) mRNA, complete cds | | |
| 622 | 363086 | CKMT1 | Human mitochondrial creatine kinase | AA019482 | Hs.153998 |
| | | | (CKMT) gene, complete cds | | |
| 623 | 363086 | CKMT1 | Human mitochondrial creatine kinase | AA019332 | Hs.153998 |
| | | | (CKMT) gene, complete cds | | |
| 624 | 1390584 | MIPEP | Human mitochondrial intermediate | AA843592 | Hs.68583 |
| | | | peptidase precursor (MIPEP) mRNA, | | |
| | | | mitochondrial gene encoding | | |
| | | | mitochondrial protein, complete cds | | |
| 625 | 134269 | POLRMT | Human mitochondrial RNA polymerase | R31115 | Hs.153880 |
| | | | mRNA, nuclear gene encoding | | |
| | | | mitochondrial protein, complete cds | | |
| 626 | 134269 | POLRMT | Human mitochondrial RNA polymerase | R31174 | Hs.153880 |
| | | | mRNA, nuclear gene encoding | | |
| | | | mitochondrial protein, complete cds | | |
| 627 | 781050 | PFDN5 | Human mRNA for c-myc binding protein, | AA446453 | Hs.80686 |
| | | | complete cds | | |
| 628 | 781050 | PFDN5 | Human mRNA for c-myc binding protein, | AA430010 | Hs.80686 |
| | | | complete cds | | |
| 629 | 451706 | POLA | Human mRNA for DNA polymerase | AA707650 | Hs.74090 |
| | | | alpha-subunit | | |
| 630 | 41541 | EST | Human mRNA for KIAA0017 gene, | R52789 | Hs.253023 |
| | | | complete cds | | |
| 631 | 41541 | EST | Human mRNA for KIAA0017 gene, | R52788 | Hs.253023 |
| | | | complete cds | | |
| 632 | 842818 | KARS | Human mRNA for KIAA0070 gene, | AA486374 | Hs.3100 |
| | | | partial cds | | |
| 633 | 842818 | KARS | Human mRNA for KIAA0070 gene, | AA486220 | Hs.3100 |
| | | | partial cds | | |
| 634 | 280496 | KIAA0123 | Human mRNA for KIAA0123 gene, | N51632 | Hs.75353 |
| | | | partial cds | | |
| 635 | 859627 | KIAA0185 | Human mRNA for KIAA0185 gene, | AA666405 | Hs.255573 |
| | | | partial cds | | |
| 636 | 783698 | KIAA0188 | Human mRNA for KIAA0188 gene, | AA446822 | Hs.81412 |
| | | | partial cds | | |
| 637 | 783698 | KIAA0188 | Human mRNA for KIAA0188 gene, | AA446821 | Hs.81412 |
| | | | partial cds | | |
| 638 | 347031 | KIAA0195 | Human mRNA for KIAA0195 gene, | W79511 | Hs.80540 |
| | | | complete cds | | |
| 639 | 347031 | KIAA0195 | Human mRNA for KIAA0195 gene, | W79398 | Hs.80540 |
| | | | complete cds | | |
| 640 | 753248 | KIAA0381 | Human mRNA for KIAA0381 gene, | AA406231 | Hs.100113 |
| | | | partial cds | | |
| 641 | 753248 | KIAA0381 | Human mRNA for KIAA0381 gene, | AA406503 | Hs.100113 |
| | | | partial cds | | |
| 642 | 108208 | HADHB | Human mRNA for mitochondrial 3- | T69767 | Hs.146812 |
| | | | ketoacyl-CoA thiolase beta-subunit of | | |
| | | | trifunctional protein, complete cds | | |
| 643 | 108208 | HADHB | Human mRNA for mitochondrial 3- | T70752 | Hs.146812 |
| | | | ketoacyl-CoA thiolase beta-subunit of | | |
| | | | trifunctional protein, complete cds | | |
| 644 | 869538 | NDUFA4 | Human NADH: ubiquinone | AA680322 | Hs.108661 |
| | | | oxidoreductase MLRQ subunit mRNA, | | |
| | | | complete cds | | |
| 645 | 810452 | TOM34 | Human putative outer mitochondrial | AA457118 | Hs.76927 |
| | | | membrane 34 kDa translocase hTOM34 | | |
| | | | mRNA, complete cds | | |
| 646 | 127197 | CXORF6 | Human Xq28 mRNA, complete cds | R08270 | Hs.20136 |
| 647 | 127197 | CXORF6 | Human Xq28 mRNA, complete cds | R08271 | Hs.20136 |
| 648 | 811108 | TRIP6 | Human zyxin related protein ZRP-1 | AA485677 | Hs.119498 |
| | | | mRNA, complete cds | | |
| 649 | 811108 | TRIP6 | Human zyxin related protein ZRP-1 | AA485807 | Hs.119498 |
| | | | mRNA, complete cds | | |
| 650 | 79828 | HD | Huntingtin (Huntington disease) | T64094 | Hs.79391 |
| 651 | 79828 | HD | Huntingtin (Huntington disease) | T64015 | Hs.79391 |
| 652 | 1752540 | HIP1 | huntingtin interacting protein 1 | AI150389 | |
| 653 | 1566230 | HYAL3 | hyaluronoglucosaminidase 3 | AI140794 | Hs.129910 |
| 654 | 2095653 | GLO4 | HYDROXYACYLGLUTATHIONE | AI420642 | |
| | | | HYDROLASE | | |
| 655 | 141966 | HSD3B1 | hydroxy-delta-5-steroid dehydrogenase, 3 | R68803 | Hs.38586 |
| | | | beta- and steroid delta-isomerase 1 | | |
| 656 | 141966 | HSD3B1 | hydroxy-delta-5-steroid dehydrogenase, 3 | R68906 | Hs.38586 |
| | | | beta- and steroid delta-isomerase 1 | | |
| 657 | 126243 | HMBS | Hydroxymethylbilane synthase | R06321 | Hs.82609 |
| 658 | 126243 | HMBS | Hydroxymethylbilane synthase | R06263 | Hs.82609 |
| 659 | 321163 | HSU79253 | hypothetical protein | W53000 | Hs.56155 |
| 660 | 321163 | HSU79253 | hypothetical protein | W52999 | Hs.56155 |
| 661 | 280507 | HPRT1 | Hypoxanthine phosphoribosyltransferase | N47312 | Hs.82314 |
| | | | 1 (Lesch-Nyhan syndrome) | | |
| 662 | 280507 | HPRT1 | Hypoxanthine phosphoribosyltransferase | N47311 | Hs.82314 |
| | | | 1 (Lesch-Nyhan syndrome) | | |
| 663 | 2216141 | IFM1 | IFM1 | AI654459 | |
| 664 | 767034 | ILVBL | ilvB (bacterial acetolactate synthase)-like | AA424288 | Hs.78880 |
| 665 | 767034 | ILVBL | ilvB (bacterial acetolactate synthase)-like | AA451741 | Hs.78880 |
| 666 | 1606837 | IMPDH2 | IMP (inosine monophosphate) | AA996028 | Hs.75432 |
| | | | dehydrogenase 2 | | |
| 667 | 50754 | MTIF2 | INITIATION FACTOR IF-2, | H18070 | Hs.149894 |
| | | | MITOCHONDRIAL PRECURSOR | | |
| 668 | 111981 | G1P3 | interferon, alpha-inducible protein (clone | T84633 | Hs.179972 |
| | | | IFI-6-16) | | |
| 669 | 111981 | G1P3 | interferon, alpha-inducible protein (clone | T91807 | Hs.179972 |
| | | | IFI-6-16) | | |
| 670 | 491763 | IL1B | Interleukin 1, beta | AA150507 | Hs.126256 |
| 671 | 491763 | IL1B | Interleukin 1, beta | AA156711 | Hs.126256 |
| 672 | 2119594 | IDH1 | ISOCITRATE DEHYDROGENASE | AI399657 | |
| 673 | 869375 | IDH2 | Isocitrate dehydrogenase 2 (NADP+), | AA679907 | Hs.252546 |
| | | | mitochondrial | | |
| 674 | 2168168 | ETFB | isocitrate dehydrogenase 3 (NAD+) alpha | AI565774 | |
| | | | (IDH3A), | | |
| 675 | 755474 | IARS | isoleucine-tRNA synthetase | AA410636 | |
| 676 | 755474 | IARS | isoleucine-tRNA synthetase | AA419192 | |
| 677 | 810325 | IVD | isovaleryl Coenzyme A dehydrogenase | AA464149 | Hs.77510 |
| 678 | 810325 | IVD | isovaleryl Coenzyme A dehydrogenase | AA464216 | Hs.77510 |
| 679 | 2148505 | JC4913 | JC4913 | AI469831 | |
| 680 | 809707 | JUNB | jun B proto-oncogene | AA454711 | Hs.198951 |
| 681 | 809707 | JUNB | jun B proto-oncogene | AA456366 | Hs.198951 |
| 682 | 1474284 | KAI1 | kangai 1 (suppression of tumorigenicity | AA922309 | Hs.25409 |
| | | | 6, prostate; CD82 antigen (R2 leukocyte | | |
| | | | antigen, antigen detected by monoclonal | | |
| | | | and antibody IA4)) | | |
| 683 | 845441 | KIAA0016 | KIAA0016 gene product | AA644550 | Hs.75187 |
| 684 | 2241563 | KIHUA3 | KIHUA3 | AI632351 | |
| 685 | 21738 | HADHSC | L-3-hydroxyacyl-Coenzyme A | T65482 | Hs.7153 |
| | | | dehydrogenase, short chain | | |
| 686 | 21738 | HADHSC | L-3-hydroxyacyl-Coenzyme A | T65407 | Hs.7153 |
| | | | dehydrogenase, short chain | | |
| 687 | 884644 | LAMR1 | Laminin receptor (2H5 epitope) | AA629897 | Hs.181357 |
| 688 | 704360 | LCFA_HUMAN | LCFA_HUMAN | AA279565 | |
| 689 | 1256792 | MAD4 | Mad4 homolog | AA875977 | Hs.102402 |
| 690 | 1908746 | MDH1 | MALATE DEHYDROGENASE | AI302237 | |
| 691 | 1636908 | MDH2 | malate dehydrogenase 2, NAD | AI000271 | Hs.111076 |
| | | | (mitochondrial) | | |
| 692 | 2010949 | ME2 | malic enzyme 2, mitochondrial | AI361039 | Hs.75342 |
| 693 | 896921 | ME3 | malic enzyme, NADP+-dependent, | AA779401 | Hs.2838 |
| | | | mitochondrial | | |
| 694 | 814211 | M6PR | Mannose-6-phosphate receptor (cation | AA465223 | Hs.75709 |
| | | | dependent) | | |
| 695 | 814211 | M6PR | Mannose-6-phosphate receptor (cation | AA465578 | Hs.75709 |
| | | | dependent) | | |
| 696 | 589115 | MMP1 | matrix metalloproteinase 1 (interstitial | AA143201 | |
| | | | collagenase) | | |
| 697 | 589115 | MMP1 | matrix metalloproteinase 1 (interstitial | AA143331 | |
| | | | collagenase) | | |
| 698 | 1574438 | MMP11 | matrix metalloproteinase 11 (stromelysin | AA954935 | Hs.155324 |
| | | | 3) | | |
| 699 | 196612 | MMP12 | matrix metalloproteinase 12 (macrophage | R92994 | Hs.1695 |
| | | | elastase) | | |
| 700 | 196612 | MMP12 | matrix metalloproteinase 12 (macrophage | R93037 | Hs.1695 |
| | | | elastase) | | |
| 701 | 251047 | MMP17 | matrix metalloproteinase 17 (membrane- | H97792 | Hs.159581 |
| | | | inserted) | | |
| 702 | 784589 | MMP15 | Matrix metalloproteinase 2 | AA443300 | Hs.80343 |
| 703 | 784589 | MMP15 | Matrix metalloproteinase 2 | AA443433 | Hs.80343 |
| 704 | 470393 | MMP7 | matrix metalloproteinase 7 (matrilysin, | AA031513 | Hs.2256 |
| | | | uterine) | | |
| 705 | 470393 | MMP7 | matrix metalloproteinase 7 (matrilysin, | AA031514 | Hs.2256 |
| | | | uterine) | | |
| 706 | 2213770 | CCHU | Matrix metalloproteinase 7 (matrilysin, | AI582304 | |
| | | | uterine) | | |
| 707 | 22040 | MMP9 | matrix metalloproteinase 9 (gelatinase B, | T72581 | |
| | | | 92 kD gelatinase, 92 kD type IV | | |
| | | | collagenase) | | |
| 708 | 22040 | MMP9 | matrix metalloproteinase 9 (gelatinase B, | T64837 | |
| | | | 92 kD gelatinase, 92 kD type IV | | |
| | | | collagenase) | | |
| 709 | 773266 | MMP9 | matrix metalloproteinase 9 (gelatinase B, | AA425227 | Hs.151738 |
| | | | 92 kD gelatinase, 92 kD type IV | | |
| | | | collagenase) | | |
| 710 | 773266 | MMP9 | matrix metalloproteinase 9 (gelatinase B, | AA425503 | Hs.151738 |
| | | | 92 kD gelatinase, 92 kD type IV | | |
| | | | collagenase) | | |
| 711 | 2091860 | MMPL1 | matrix metalloproteinase-like 1 | AI382081 | Hs.198265 |
| 712 | 240766 | Data unavailable | METALLOPROTEINASE INHIBITOR | H80214 | |
| | | | 1 PRECURSOR | | |
| 713 | 240766 | Data unavailable | METALLOPROTEINASE INHIBITOR | H80215 | |
| | | | 1 PRECURSOR | | |
| 714 | 2165301 | DEHUMT | methylene tetrahydrofolate | AI497794 | |
| | | | dehydrogenase (NAD+ dependent), | | |
| | | | methenyltetrahydrofolate cyclohydrolase | | |
| 715 | 1473506 | MMSA_HUMAN | METHYLMALONATE- | AA915881 | |
| | | | SEMIALDEHYDE | | |
| | | | DEHYDROGENASE | | |
| 716 | 2091562 | S40622 | METHYLMALONYL-COA MUTASE | AI377286 | |
| | | | PRECURSOR | | |
| 717 | 278570 | MITF | Microphthalmia-associated transcription | N66177 | Hs.166017 |
| | | | factor | | |
| 718 | 278570 | MITF | Microphthalmia-associated transcription | N99168 | Hs.166017 |
| | | | factor | | |
| 719 | 768443 | MGST1 | microsomal glutathione S-transferase 1 | AA495936 | Hs.790 |
| 720 | 768443 | MGST1 | microsomal glutathione S-transferase 1 | AA495935 | Hs.790 |
| 721 | 629896 | MAP1B | MICROTUBULE-ASSOCIATED | AA219045 | Hs.103042 |
| | | | PROTEIN 1B | | |
| 722 | 1084029 | A56650 | MITOCHONDRIAL 2- | AA594052 | |
| | | | OXOGLUTARATE/MALATE | | |
| | | | CARRIER PROTEIN | | |
| 723 | 44255 | RPML3 | MITOCHONDRIAL 60S RIBOSOMAL | H06113 | Hs.79086 |
| | | | PROTEIN L3 | | |
| 724 | 44255 | RPML3 | MITOCHONDRIAL 60S RIBOSOMAL | H05820 | Hs.79086 |
| | | | PROTEIN L3 | | |
| 725 | 433553 | CA5 | Mitochondrial carbonic anhydrase | AA699469 | Hs.177446 |
| 726 | 1175538 | A39018 | MITOCHONDRIAL CARNITINE | AA641442 | |
| | | | PALMITOYLTRANSFERASE II | | |
| | | | PRECURSOR | | |
| 727 | 324618 | TSFM | MITOCHONDRIAL ELONGATION | W47015 | Hs.3273 |
| | | | FACTOR TS PRECURSOR | | |
| 728 | 324618 | TSFM | MITOCHONDRIAL ELONGATION | W47014 | Hs.3273 |
| | | | FACTOR TS PRECURSOR | | |
| 729 | 2066585 | LON-PEN | MITOCHONDRIAL LON PROTEASE | AI377406 | |
| | | | HOMOLOG | | |
| 730 | 133099 | MMP1 Precursor | MITOCHONDRIAL MATRIX | R26234 | |
| | | | PROTEIN P1 PRECURSOR | | |
| 731 | 133099 | MMP1 Precursor | MITOCHONDRIAL MATRIX | R26235 | |
| | | | PROTEIN P1 PRECURSOR | | |
| 732 | 448491 | mrp2 | MITOCHONDRIAL RIBOSOMAL | AA777627 | |
| | | | PROTEIN S14 | | |
| 733 | 1587031 | HSPA9 | MITOCHONDRIAL STRESS-70 | AA948223 | |
| | | | PROTEIN | | |
| 734 | 814346 | MTIF2 | mitochondrial translational initiation | AA458825 | Hs.149894 |
| | | | factor 2 | | |
| 735 | 814346 | MTIF2 | mitochondrial translational initiation | AA459016 | Hs.149894 |
| | | | factor 2 | | |
| 736 | 1916771 | MTRF1 | mitochondrial translational release factor 1 | AI347695 | Hs.80683 |
| 737 | 1880757 | MAP3K5 | mitogen-activated protein kinase kinase | AI268273 | Hs.151988 |
| | | | kinase 5 | | |
| 738 | 2244621 | MRF1 | MRF1 | AI656905 | |
| 739 | 645006 | MRP4 | MRP4 | AA197284 | |
| 740 | 645006 | MRP4 | MRP4 | AA205815 | |
| 741 | 1933324 | MPZ | myelin protein zero (Charcot-Marie- | AI351956 | Hs.93883 |
| | | | Tooth neuropathy 1B) | | |
| 742 | 302190 | MLL | myeloid/lymphoid or mixed-lineage | W16724 | Hs.199160 |
| | | | leukemia (trithorax (Drosophila) | | |
| | | | homolog) | | |
| 743 | 302190 | MLL | myeloid/lymphoid or mixed-lineage | N77807 | Hs.199160 |
| | | | leukemia (trithorax (Drosophila) | | |
| | | | homolog) | | |
| 744 | 842989 | MYL6 | MYOSIN LIGHT CHAIN ALKALI, | AA488346 | Hs.77385 |
| | | | NON-MUSCLE ISOFORM | | |
| 745 | 842989 | MYL6 | MYOSIN LIGHT CHAIN ALKALI, | AA488477 | Hs.77385 |
| | | | NON-MUSCLE ISOFORM | | |
| 746 | 814615 | MTHFD2 | NAD-dependent methylene | AA480995 | Hs.154672 |
| | | | tetrahydrofolate dehydrogenase | | |
| | | | cyclohydrolase | | |
| 747 | 814615 | MTHFD2 | NAD-dependent methylene | AA480994 | Hs.154672 |
| | | | tetrahydrofolate dehydrogenase | | |
| | | | cyclohydrolase | | |
| 748 | 773287 | NDUFA2 | NADH dehydrogenase (ubiquinone) 1 | AA425211 | Hs.163867 |
| | | | alpha subcomplex, 2 (8 kD, B8) | | |
| 749 | 773287 | NDUFA2 | NADH dehydrogenase (ubiquinone) 1 | AA425534 | Hs.163867 |
| | | | alpha subcomplex, 2 (8 kD, B8) | | |
| 750 | 1635681 | NDUFA2 | NADH dehydrogenase (ubiquinone) 1 | AI017426 | Hs.163867 |
| | | | alpha subcomplex, 2 (8 kD, B8) | | |
| 751 | 950578 | NDUFA5 | NADH dehydrogenase (ubiquinone) 1 | AA608515 | Hs.83916 |
| | | | alpha subcomplex, 5 (13 kD, B13) | | |
| 752 | 897987 | NDUFA9 | NADH dehydrogenase (ubiquinone) 1 | AA598884 | Hs.75227 |
| | | | alpha subcomplex, 9 (39 kD) | | |
| 753 | 450896 | NDUFB4 | NADH dehydrognase (ubiquinone) 1 | AA704675 | |
| | | | beta subcomplex, 4 (15 kD, B15) | | |
| 754 | 562409 | NDUFS5 | NADH dehydrogenase (ubiquinone) 1 | AA214053 | Hs.80595 |
| | | | beta subcomplex, 4 (15 kD, B15) | | |
| 755 | 562409 | NDUFS5 | NADH dehydrogenase (ubiquinone) 1 | AA214154 | Hs.80595 |
| | | | beta subcomplex, 4 (15 kD, B15) | | |
| 756 | 307933 | NDUFB5 | NADH dehydrogenase (ubiquinone) 1 | N93053 | Hs.19236 |
| | | | beta subcomplex, 5 (16 kD, SGDH) | | |
| 757 | 307933 | NDUFB5 | NADH dehydrogenase (ubiquinone) 1 | W21390 | Hs.19236 |
| | | | beta subcomplex, 5 (16 kD, SGDH) | | |
| 758 | 470861 | NDUFB6 | NADH dehydrogenase (ubiquinone) 1 | AA034268 | Hs.109646 |
| | | | beta subcomplex, 6 (17 kD, B17) | | |
| 759 | 470861 | NDUFB6 | NADH dehydrogenase (ubiquinone) 1 | AA032077 | Hs.109646 |
| | | | beta subcomplex, 6 (17 kD, B17) | | |
| 760 | 771089 | NDUFB7 | NADH dehydrogenase (ubiquinone) 1 | AA428058 | Hs.661 |
| | | | beta subcomplex, 7 (18 kD, B18) | | |
| 761 | 771089 | NDUFB7 | NADH dehydrogenase (ubiquinone) 1 | AA429046 | Hs.661 |
| | | | beta subcomplex, 7 (18 kD, B18) | | |
| 762 | 796513 | NDUFC1 | NADH dehydrogenase (ubiquinone) 1, | AA460251 | Hs.84549 |
| | | | subcomplex unknown, 1 (6 kD, KFYI) | | |
| 763 | 796513 | NDUFC1 | NADH dehydrogenase (ubiquinone) 1, | AA463815 | Hs.84549 |
| | | | subcomplex unknown, 1 (6 kD, KFYI) | | |
| 764 | 753457 | NDUFS1 | NADH dehydrogenase (ubiquinone) Fe—S | AA406535 | Hs.8248 |
| | | | protein 1 (75 kD) (NADH-coenzyme Q | | |
| | | | reductase) | | |
| 765 | 753457 | NDUFS1 | NADH dehydrogenase (ubiquinone) Fe—S | AA406536 | Hs.8248 |
| | | | protein 1 (75 kD) (NADH-coenzyme Q | | |
| | | | reductase) | | |
| 766 | 743811 | NDUFS3 | NADH dehydrogenase (ubiquinone) Fe—S | AA634381 | Hs.5273 |
| | | | protein 3 (30 kD) (NADH-coenzyme Q | | |
| | | | reductase) | | |
| 767 | 377152 | NDUFS4 | NADH dehydrogenase (ubiquinone) Fe—S | AA055101 | Hs.10758 |
| | | | protein 4 (18 kD) (NADH-coenzyme Q | | |
| | | | reductase) | | |
| 768 | 377152 | NDUFS4 | NADH dehydrogenase (ubiquinone) Fe—S | AA055102 | Hs.10758 |
| | | | protein 4 (18 kD) (NADH-coenzyme Q | | |
| | | | reductase) | | |
| 769 | 502141 | NDUFS8 | NADH dehydrogenase (ubiquinone) Fe—S | AA127014 | Hs.90443 |
| | | | protein 8 (23 kD) (NADH-coenzyme Q | | |
| | | | reductase) | | |
| 770 | 502141 | NDUFS8 | NADH dehydrogenase (ubiquinone) Fe—S | AA128218 | Hs.90443 |
| | | | protein 8 (23 kD) (NADH-coenzyme Q | | |
| | | | reductase) | | |
| 771 | 1486260 | NDUFV2 | NADH dehydrogenase (ubiquinone) | AA922326 | Hs.51299 |
| | | | flavoprotein 2 (24 kD) | | |
| 772 | 1676983 | RDHUB5 | NADH-CYTOCHROME B5 | AI076798 | |
| | | | REDUCTASE | | |
| 773 | 1632011 | NPR2 | natriuretic peptide receptor B/guanylate | AA994689 | Hs.78518 |
| | | | cyclase B (atrionatriuretic peptide | | |
| | | | receptor B) | | |
| 774 | 994950 | NDUFA10 | NDUFA10 | AA555087 | |
| 775 | 1588691 | NDUFA2 | NDUFA2 | AA975360 | |
| 776 | 929358 | NDUFA3 | NDUFA3 | AA492039 | |
| 777 | 2118546 | NDUFA6 | NDUFA6 | AI524304 | |
| 778 | 1270489 | NDUFA7 | NDUFA7 | AA748476 | |
| 779 | 171756 | NDUFA8 | NDUFA8 | H18333 | |
| 780 | 171756 | NDUFA8 | NDUFA8 | H18364 | |
| 781 | 1473135 | NDUFAB1 | NDUFAB1 | AA873566 | |
| 782 | 998616 | NDUFB1 | NDUFB1 | AA535762 | |
| 783 | 2170527 | NDUFB10 | NDUFB10 | AI571333 | |
| 784 | 1881693 | NDUFB2 | NDUFB2 | AI290799 | |
| 785 | 2103675 | NDUFB3 | NDUFB3 | AI401200 | |
| 786 | 2266937 | NDUFB8 | NDUFB8 | AI608733 | |
| 787 | 984496 | NDUFB9 | NDUFB9 | AA526075 | |
| 788 | 2277817 | NDUFC2 | NDUFC2 | AI653801 | |
| 789 | 1019401 | NDUFS2 | NDUFS2 | AA551149 | |
| 790 | 1585499 | NDUFS5 | NDUFS5 | AA974058 | |
| 791 | 51826 | NNT | nicotinamide nucleotide transhydrogenase | H22944 | Hs.18136 |
| 792 | 51826 | NNT | nicotinamide nucleotide transhydrogenase | H24126 | Hs.18136 |
| 793 | 1160732 | NOS2A | Nitric oxide synthase 2A (inducible, | AA877840 | Hs.193788 |
| | | | hepatocytes) | | |
| 794 | 150466 | EST | Nitric oxide synthase 3 (endothelial cell) | H01039 | Hs.237163 |
| 795 | 150466 | EST | Nitric oxide synthase 3 (endothelial cell) | H01788 | Hs.237163 |
| 796 | 1468820 | NOS3 | nitric oxide synthase 3 (endothelial cell) | AA884967 | Hs.166373 |
| 797 | 755750 | NME2 | non-metastatic cells 2, protein (NM23B) | AA496628 | Hs.255790 |
| | | | expressed in | | |
| 798 | 755750 | NME2 | non-metastatic cells 2, protein (NM23B) | AA496512 | Hs.255790 |
| | | | expressed in | | |
| 799 | 207808 | NFATC3 | nuclear factor of activated T-cells, | H59048 | Hs.172674 |
| | | | cytoplasmic 3 | | |
| 800 | 207808 | NFATC3 | nuclear factor of activated T-cells, | H59047 | Hs.172674 |
| | | | cytoplasmic 3 | | |
| 801 | 1870662 | A54868 | nuclear respiratory factor 1 (NRF1) | AI245773 | |
| 802 | 567414 | NFYB | nuclear transcription factor Y, beta | AA130846 | |
| 803 | 783696 | OAT | ornithine aminotransferase (gyrate | AA446819 | Hs.75485 |
| | | | atrophy) | | |
| 804 | 783696 | OAT | ornithine aminotransferase (gyrate | AA446820 | Hs.75485 |
| | | | atrophy) | | |
| 805 | 796646 | ODC1 | Ornithine decarboxylase 1 | AA460115 | Hs.75212 |
| 806 | 796646 | ODC1 | Ornithine decarboxylase 1 | AA461467 | Hs.75212 |
| 807 | 1637751 | OXA1L | oxidase (cytochrome c) assembly 1-like | AI001180 | Hs.151134 |
| 808 | 1704170 | OXA1HS | oxoglutarate dehydrogenase (lipoamide) | AI096611 | |
| 809 | 233479 | No Data | Oxoglutarate dehydrogenase (lipoamide) | H78910 | |
| 810 | 233479 | No Data | Oxoglutarate dehydrogenase (lipoamide) | H80138 | |
| 811 | 1371793 | OGDH | oxoglutarate dehydrogenase (lipoamide) | AA856769 | Hs.168669 |
| 812 | 1632231 | UQCRC1 | P31930 UBIQUINOL-CYTOCHROME- | AI005342 | |
| | | | C REDUCTASE COMPLEX CORE | | |
| | | | PROTEIN I PRECURSOR | | |
| 813 | 162775 | DDX5 | P68 PROTEIN | H27564 | Hs.76053 |
| 814 | 162775 | DDX5 | P68 PROTEIN | H27646 | Hs.76053 |
| 815 | 43884 | PPIF | PEPTIDYL-PROLYL CIS-TRANS | H05580 | Hs.173125 |
| | | | ISOMERASE, MITOCHONDRIAL | | |
| | | | PRECURSOR | | |
| 816 | 43884 | PPIF | PEPTIDYL-PROLYL CIS-TRANS | H05115 | Hs.173125 |
| | | | ISOMERASE, MITOCHONDRIAL | | |
| | | | PRECURSOR | | |
| 817 | 774726 | PPIF | peptidylprolyl isomerase F (cyclophilin | AA442081 | Hs.173125 |
| | | | F) | | |
| 818 | 774726 | PPIF | peptidylprolyl isomerase F (cyclophilin | AA442184 | Hs.173125 |
| | | | F) | | |
| 819 | 133273 | PMP22 | peripheral myelin protein 22 | R26960 | Hs.103724 |
| 820 | 133273 | PMP22 | peripheral myelin protein 22 | R26732 | Hs.103724 |
| 821 | 788518 | PXMP3 | Peroxisomal membrane protein 3 (35 kD, | AA452566 | |
| | | | Zellweger syndrome) | | |
| 822 | 788518 | PXMP3 | Peroxisomal membrane protein 3 (35 kD, | AA452747 | |
| | | | Zellweger syndrome) | | |
| 823 | 1476157 | PXR1 | peroxisome receptor 1 | AA873073 | Hs.158084 |
| 824 | 455263 | PET112L | PET112 (yeast homolog)-like | AA677572 | Hs.11127 |
| 825 | 951683 | PHC | PHC | AA629980 | |
| 826 | 843109 | FARS1 | phenylalanine-tRNA synthetase | AA488691 | Hs.57969 |
| 827 | 843109 | FARS1 | phenylalanine-tRNA synthetase | AA486503 | Hs.57969 |
| 828 | 842784 | PHC | phosphate carrier, mitochondrial | AA486305 | Hs.78713 |
| 829 | 842784 | PHC | phosphate carrier, mitochondrial | AA486200 | Hs.78713 |
| 830 | 346009 | PFKL | Phosphofructokinase (liver type) | W72140 | Hs.155455 |
| 831 | 346009 | PFKL | Phosphofructokinase (liver type) | W77881 | Hs.155455 |
| 832 | 489626 | PFKM | Phosphofructokinase, muscle | AA099169 | Hs.75160 |
| 833 | 489626 | PFKM | Phosphofructokinase, muscle | AA101919 | Hs.75160 |
| 834 | 183194 | | phospholipase A2, group IIA (platelets, | H44953 | |
| | | | synovial fluid) | | |
| 835 | 183194 | | phospholipase A2, group IIA (platelets, | H45000 | |
| | | | synovial fluid) | | |
| 836 | 77915 | PLA2G2A | phospholipase A2, group IIA (platelets, | T61323 | Hs.76422 |
| | | | synovial fluid) | | |
| 837 | 77915 | PLA2G2A | phospholipase A2, group IIA (platelets, | T61271 | Hs.76422 |
| | | | synovial fluid) | | |
| 838 | 2367279 | PN0673 | PN0673 | AI741984 | |
| 839 | 780947 | POLD1 | Polymerase (DNA directed), delta 1, | AA429661 | Hs.99890 |
| | | | catalytic subunit (125 kD) | | |
| 840 | 780947 | POLD1 | Polymerase (DNA directed), delta 1, | AA446151 | Hs.99890 |
| | | | catalytic subunit (125 kD) | | |
| 841 | 626206 | POLG | polymerase (DNA directed), gamma | AA188761 | Hs.80961 |
| 842 | 626206 | POLG | polymerase (DNA directed), gamma | AA188629 | Hs.80961 |
| 843 | 827129 | POLRMT | polymerase (RNA) mitochondrial (DNA | AA521239 | Hs.153880 |
| | | | directed) | | |
| 844 | 2144562 | PRAX-1 | PRAX-1 | AI452994 | |
| 845 | 826211 | PDCD2 | Programmed cell death 2 | AA521466 | Hs.41639 |
| 846 | 814337 | PCCB | propionyl Coenzyme A carboxylase, beta | AA459122 | Hs.63788 |
| | | | polypeptide | | |
| 847 | 814337 | PCCB | propionyl Coenzyme A carboxylase, beta | AA459341 | Hs.63788 |
| | | | polypeptide | | |
| 848 | 950710 | PCCA | Propionyl-coA carboxylase alpha chain | AA608575 | Hs.80741 |
| 849 | 824568 | KLK3 | Prostate specific antigen | AA490981 | Hs.171995 |
| 850 | 843134 | PBP | Prostatic binding protein | AA486514 | Hs.80423 |
| 851 | 843134 | PBP | Prostatic binding protein | AA485909 | Hs.80423 |
| 852 | 261971 | PRSM1 | protease, metallo, 1, 33 kD | N27227 | Hs.183138 |
| 853 | 261971 | PRSM1 | protease, metallo, 1, 33 kD | H98666 | Hs.183138 |
| 854 | 375728 | PRSM1 | protease, metallo, 1, 33 kD | AA033807 | Hs.183138 |
| 855 | 51041 | Est | protoporphyrinogen oxidase | H18633 | Hs.123641 |
| 856 | 51041 | Est | protoporphyrinogen oxidase | H18716 | Hs.123641 |
| 857 | 247160 | PPOX | protoporphyrinogen oxidase | N57891 | Hs.100016 |
| 858 | 504452 | PPOX | protoporphyrinogen oxidase | AA151249 | Hs.100016 |
| 859 | 504452 | PPOX | protoporphyrinogen oxidase | AA151248 | Hs.100016 |
| 860 | 501939 | HHCMA56 | putative oxidoreductase | AA128041 | Hs.519 |
| 861 | 501939 | HHCMA56 | putative oxidoreductase | AA128086 | Hs.519 |
| 862 | 108378 | PC | pyruvate carboxylase | T77729 | Hs.89890 |
| 863 | 108378 | PC | pyruvate carboxylase | T77728 | Hs.89890 |
| 864 | 80374 | PDHA1 | Pyruvate dehydrogenase (lipoamide) | T65833 | Hs.1023 |
| | | | alpha 1 | | |
| 865 | 80374 | PDHA1 | Pyruvate dehydrogenase (lipoamide) | T65758 | Hs.1023 |
| | | | alpha 1 | | |
| 866 | 826077 | PDHB | pyruvate dehydrogenase (lipoamide) beta | AA521401 | Hs.979 |
| 867 | 279665 | PDX1 | Pyruvate dehydrogenase complex, lipoyl- | N48320 | Hs.74642 |
| | | | containing component X; E3-binding | | |
| | | | protein | | |
| 868 | 279665 | PDX1 | Pyruvate dehydrogenase complex, lipoyl- | N49046 | Hs.74642 |
| | | | containing component X; E3-binding | | |
| | | | protein | | |
| 869 | 1542260 | PDHA2 | PYRUVATE DEHYDROGENASE E1 | AA927400 | |
| | | | COMPONENT, ALPHA | | |
| 870 | 1645668 | PDK1 | pyruvate dehydrogenase kinase, | AI026814 | Hs.159477 |
| | | | isoenzyme 1 | | |
| 871 | 66686 | No Data | QM PROTEIN | T67270 | |
| 872 | 66686 | No Data | QM PROTEIN | T67271 | |
| 873 | 590727 | RENT1 | regulator of nonsense transcripts 1 | AA156342 | Hs.12719 |
| 874 | 590727 | RENT1 | regulator of nonsense transcripts 1 | AA156376 | Hs.12719 |
| 875 | 624627 | RRM2 | Ribonucleotide reductase M2 polypeptide | AA187351 | Hs.75319 |
| 876 | 624627 | RRM2 | Ribonucleotide reductase M2 polypeptide | AA188430 | Hs.75319 |
| 877 | 788334 | RPL23L | ribosomal protein L23-like | AA453015 | Hs.3254 |
| 878 | 730124 | RPL7 | Ribosomal protein L7 | AA412470 | Hs.153 |
| 879 | 730124 | RPL7 | Ribosomal protein L7 | AA412344 | Hs.153 |
| 880 | 809578 | RPS5 | Ribosomal protein S5 | AA456616 | Hs.76194 |
| 881 | 809578 | RPS5 | Ribosomal protein S5 | AA455795 | Hs.76194 |
| 882 | 214133 | FSRG1 | RING3 PROTEIN | H72520 | Hs.75243 |
| 883 | 214133 | FSRG1 | RING3 PROTEIN | H72918 | Hs.75243 |
| 884 | 110744 | SCO2 | SCO (cytochrome oxidase deficient, | T90560 | Hs.180903 |
| | | | yeast) homolog 2 | | |
| 885 | 110744 | SCO2 | SCO (cytochrome oxidase deficient, | T83097 | Hs.180903 |
| | | | yeast) homolog 2 | | |
| 886 | 646657 | SCO1 | SCO1 (yeast homolog) cytochrome | AA205413 | Hs.14511 |
| | | | oxidase deficient 1 | | |
| 887 | 646657 | SCO1 | SCO1 (yeast homolog) cytochrome | AA205579 | Hs.14511 |
| | | | oxidase deficient 1 | | |
| 888 | 1074487 | SDHD | SDHD | AA579646 | |
| 889 | 951117 | SHMT2 | serine hydroxymethyltransferase 2 | AA620477 | |
| | | | (mitochondrial) | | |
| 890 | 2138479 | XNHUSP | SERINE--PYRUVATE | AI521720 | |
| | | | AMINOTRANSFERASE | | |
| 891 | 125183 | SSBP | single-stranded DNA-binding protein | R05693 | Hs.923 |
| 892 | 125183 | SSBP | single-stranded DNA-binding protein | R05694 | Hs.923 |
| 893 | 813678 | SLC1A3 | solute carrier family 1 (glial high affinity | AA453823 | Hs.75379 |
| | | | glutamate transporter), member 3 | | |
| 894 | 813678 | SLC1A3 | solute carrier family 1 (glial high affinity | AA453742 | Hs.75379 |
| | | | glutamate transporter), member 3 | | |
| 895 | 586990 | SLC11A2 | solute carrier family 11 (proton-coupled | AA133656 | Hs.57435 |
| | | | divalent metal ion transporters), member 2 | | |
| 896 | 586990 | SLC11A2 | solute carrier family 11 (proton-coupled | AA133655 | Hs.57435 |
| | | | divalent metal ion transporters), member 2 | | |
| 897 | 2029995 | SLC12A7 | solute carrier family 12 | AI492956 | Hs.172613 |
| | | | (potassium/chloride transporters), | | |
| | | | member 7 | | |
| 898 | 190732 | SLC2A5 | Solute carrier family 2 (facilitated glucose | H38650 | Hs.33084 |
| | | | transporter), member 5 | | |
| 899 | 190732 | SLC2A5 | Solute carrier family 2 (facilitated glucose | H38733 | Hs.33084 |
| | | | transporter), member 5 | | |
| 900 | 758304 | SLC25A14 | solute carrier family 25 (mitochondrial | AA404241 | Hs.194686 |
| | | | carrier, brain), member 14 | | |
| 901 | 758304 | SLC25A14 | solute carrier family 25 (mitochondrial | AA401224 | Hs.194686 |
| | | | carrier, brain), member 14 | | |
| 902 | 897107 | SLC25A1 | solute carrier family 25 (mitochondrial | AA676877 | Hs.111024 |
| | | | carrier; citrate transporter), member 1 | | |
| 903 | 878413 | SLC25A11 | solute carrier family 25 (mitochondrial | AA670357 | Hs.184877 |
| | | | carrier; oxoglutarate carrier), member 11 | | |
| 904 | 433350 | SORD | Sorbitol dehydrogenase | AA700604 | Hs.878 |
| 905 | 1256737 | SPG7 | spastic paraplegia 7, paraplegin (pure and | AA876165 | Hs.78497 |
| | | | complicated autosomal recessive) | | |
| 906 | 682528 | SCA1 | spinocerebellar ataxia 1 | AA256507 | Hs.74520 |
| | | | (olivopontocerebellar ataxia 1, autosomal | | |
| | | | dominant, ataxin 1) | | |
| 907 | 682528 | SCA1 | spinocerebellar ataxia 1 | AA256508 | Hs.74520 |
| | | | (olivopontocerebellar ataxia 1, autosomal | | |
| | | | dominant, ataxin 1) | | |
| 908 | 128875 | SCA2 | Spinocerebellar ataxia 2 | R10604 | Hs.76253 |
| | | | (olivopontocerebellar ataxia 2, autosomal | | |
| | | | dominant) | | |
| 909 | 128875 | SCA2 | Spinocerebellar ataxia 2 | R10603 | Hs.76253 |
| | | | (olivopontocerebellar ataxia 2, autosomal | | |
| | | | dominant) | | |
| 910 | 447167 | SFRS8 | splicing factor, arginine/serine-rich 8 | AA702973 | Hs.84229 |
| | | | (suppressor-of-white-apricot, Drosophila | | |
| | | | homolog) | | |
| 911 | 1934125 | B34181 | steroid 11-beta-hydroxylase | AI334352 | |
| 912 | 859858 | STAR | steroidogenic acute regulatory protein | AA679454 | Hs.3132 |
| 913 | 855395 | SCP2 | sterol carrier protein 2 | AA664009 | Hs.75760 |
| 914 | 824699 | SUCA_HUMAN | SUCA_HUMAN | AA482206 | |
| 915 | 80915 | SDHA | Succinate dehydrogenase 2, flavoprotein | T70043 | |
| | | | (Fp) subunit | | |
| 916 | 80915 | SDHA | Succinate dehydrogenase 2, flavoprotein | T70109 | |
| | | | (Fp) subunit | | |
| 917 | 797016 | SDHB | succinate dehydrogenase complex, | AA463565 | Hs.64 |
| | | | subunit B, iron sulfur (Ip) | | |
| 918 | 797016 | SDHB | succinate dehydrogenase complex, | AA463510 | Hs.64 |
| | | | subunit B, iron sulfur (Ip) | | |
| 919 | 366132 | SDHC | succinate dehydrogenase complex, | AA062805 | Hs.3577 |
| | | | subunit C, integral membrane protein, | | |
| | | | 15 kD | | |
| 920 | 504145 | LSC2 | SUCCINATE-COA LIGASE | AA132000 | |
| 921 | 504145 | LSC2 | SUCCINATE-COA LIGASE | AA131817 | |
| 922 | 845630 | SUCLA2 | succinate-CoA ligase, ADP-forming, beta | AA644577 | Hs.182217 |
| | | | subunit | | |
| 923 | 1571111 | SCOT_HUMAN | Succinyl CoA: 3-oxoacid CoA transferase | AA936982 | |
| 924 | 950489 | SOD1 | Superoxide dismutase 1 (Cu/Zn) | AA599127 | Hs.75428 |
| 925 | 1572467 | SOD2 | Superoxide dismutase 2 | AA934677 | |
| 926 | 346860 | SOD2 | superoxide dismutase 2, mitochondrial | W78148 | Hs.177781 |
| 927 | 346860 | SOD2 | superoxide dismutase 2, mitochondrial | W79913 | Hs.177781 |
| 928 | 840708 | SOD2 | Superoxide dismutase 2, mitochondrial | AA488084 | Hs.177781 |
| 929 | 840708 | SOD2 | Superoxide dismutase 2, mitochondrial | AA487750 | Hs.177781 |
| 930 | 1343732 | SOD3 | Superoxide dismutase 3, extracellular | AA725564 | Hs.2420 |
| 931 | 433474 | SURF1 | Surfeit 1 | AA699560 | Hs.3196 |
| 932 | 2114302 | surfeit 1 | surfeit 1 | AI417847 | Hs.3196 |
| 933 | 782797 | SMN1 | survival of motor neuron 1, telomeric | AA448194 | Hs.77306 |
| 934 | 704299 | TAZ | tafazzin (cardiomyopathy, dilated 3A (X- | AA279440 | Hs.79021 |
| | | | linked); endocardial fibroelastosis 2; | | |
| | | | Barth syndrome) | | |
| 935 | 789376 | TXNRD1 | thioredoxin reductase 1 | AA453335 | Hs.13046 |
| 936 | 789376 | TXNRD1 | thioredoxin reductase 1 | AA464849 | Hs.13046 |
| 937 | 796000 | MPST | thiosulfate sulfurtransferase (rhodanese) | AA461065 | Hs.74097 |
| 938 | 796000 | MPST | thiosulfate sulfurtransferase (rhodanese) | AA460495 | Hs.74097 |
| 939 | 856167 | TARS | threonyl-tRNA synthetase | AA630628 | Hs.84131 |
| 940 | 205185 | THBD | Thrombomodulin | H59861 | Hs.2030 |
| 941 | 205185 | THBD | Thrombomodulin | H60674 | Hs.2030 |
| 942 | 246300 | TIAL1 | TIA1 cytotoxic granule-associated RNA- | N59426 | Hs.182741 |
| | | | binding protein-like 1 | | |
| 943 | 842846 | TIMP2 | tissue inhibitor of metalloproteinase 2 | AA486280 | Hs.246948 |
| 944 | 489519 | TIMP3 | tissue inhibitor of metalloproteinase 3 | AA099153 | Hs.245188 |
| | | | (Sorsby fundus dystrophy, | | |
| | | | pseudoinflammatory) | | |
| 945 | 489519 | TIMP3 | tissue inhibitor of metalloproteinase 3 | AA099251 | Hs.245188 |
| | | | (Sorsby fundus dystrophy, | | |
| | | | pseudoinflammatory) | | |
| 946 | 754106 | TIMP3 | tissue inhibitor of metalloproteinase 3 | AA479202 | Hs.245188 |
| | | | (Sorsby fundus dystrophy, | | |
| | | | pseudoinflammatory) | | |
| 947 | 754106 | TIMP3 | tissue inhibitor of metalloproteinase 3 | AA478662 | Hs.245188 |
| | | | (Sorsby fundus dystrophy, | | |
| | | | pseudoinflammatory) | | |
| 948 | 433481 | TCF2 | transcription factor 2, hepatic; LF-B3; | AA699573 | Hs.169853 |
| | | | variant hepatic nuclear factor | | |
| 949 | 785845 | TCF6L1 | Transcription factor 6-like 1 | AA449118 | Hs.75133 |
| | | | (mitochondrial transcription factor 1-like) | | |
| 950 | 785845 | TCF6L1 | Transcription factor 6-like 1 | AA449551 | Hs.75133 |
| | | | (mitochondrial transcription factor 1-like) | | |
| 951 | 841334 | STIP1 | TRANSFORMATION-SENSITIVE | AA487635 | Hs.75612 |
| | | | PROTEIN IEF SSP 3521 | | |
| 952 | 841334 | STIP1 | TRANSFORMATION-SENSITIVE | AA487427 | Hs.75612 |
| | | | PROTEIN IEF SSP 3521 | | |
| 953 | 2114841 | U66035 | translocase of inner mitochondrial | AI432207 | |
| | | | membrane 8 | | |
| 954 | 970880 | TPM4 | tropomyosin 4 | AA774983 | Hs.102824 |
| 955 | 341328 | TPM1 | Tropomyosin alpha chain (skeletal | W58092 | Hs.77899 |
| | | | muscle) | | |
| 956 | 341328 | TPM1 | Tropomyosin alpha chain (skeletal | W58009 | Hs.77899 |
| | | | muscle) | | |
| 957 | 32621 | WARS2 | tryptophanyl tRNA synthetase 2 | R43272 | Hs.227274 |
| | | | (mitochondrial) | | |
| 958 | 32621 | WARS2 | tryptophanyl tRNA synthetase 2 | R18903 | Hs.227274 |
| | | | (mitochondrial) | | |
| 959 | 684582 | WARS2 | tryptophanyl tRNA synthetase 2 | AA251354 | Hs.227274 |
| | | | (mitochondrial) | | |
| 960 | 684582 | WARS2 | tryptophanyl tRNA synthetase 2 | AA251468 | Hs.227274 |
| | | | (mitochondrial) | | |
| 961 | 594079 | TID1 | tumorous imaginal discs (Drosophila) | AA169872 | Hs.6216 |
| | | | homolog | | |
| 962 | 594079 | TID1 | tumorous imaginal discs (Drosophila) | AA169567 | Hs.6216 |
| | | | homolog | | |
| 963 | 1569989 | YWHAB | tyrosine 3-monooxygenase/tryptophan 5- | AA962407 | Hs.182238 |
| | | | monooxygenase activation protein, beta | | |
| | | | polypeptide | | |
| 964 | 1591788 | YWHAZ | tyrosine 3-monooxygenase/tryptophan 5- | AA976477 | Hs.75103 |
| | | | monooxygenase activation protein, zeta | | |
| | | | polypeptide | | |
| 965 | 25499 | UQCRH | UBIQUINOL-CYTOCHROME C | R11698 | Hs.73818 |
| | | | REDUCTASE COMPLEX 11 KD | | |
| | | | PROTEIN PRECURSOR | | |
| 966 | 25499 | UQCRH | UBIQUINOL-CYTOCHROME C | R17676 | Hs.73818 |
| | | | REDUCTASE COMPLEX 11 KD | | |
| | | | PROTEIN PRECURSOR | | |
| 967 | 855843 | UQCRB | UBIQUINOL-CYTOCHROME C | AA664284 | Hs.131255 |
| | | | REDUCTASE COMPLEX 14 KD | | |
| | | | PROTEIN | | |
| 968 | 1160934 | UQCRC2 | UBIQUINOL-CYTOCHROME C | AA877491 | |
| | | | REDUCTASE CORE PROTEIN 2 | | |
| | | | PRECURSOR | | |
| 969 | 782800 | UQCRFS1 | UBIQUINOL-CYTOCHROME C | AA448184 | Hs.3712 |
| | | | REDUCTASE IRON-SULFUR | | |
| | | | SUBUNIT PRECURSOR | | |
| 970 | 1955460 | MAS2 | UCR1_HUMAN P31930 UBIQUINOL- | AI365986 | |
| | | | CYTOCHROME-C REDUCTASE | | |
| | | | COMPLEX CORE PROTEIN I | | |
| 971 | 236034 | UCP2 | uncoupling protein 2 (mitochondrial, | H61243 | Hs.80658 |
| | | | proton carrier) | | |
| 972 | 236034 | UCP2 | uncoupling protein 2 (mitochondrial, | H61242 | Hs.80658 |
| | | | proton carrier) | | |
| 973 | 628529 | EST | uncoupling protein 3 (mitochondrial, | AA192553 | Hs.76640 |
| | | | proton carrier) | | |
| 974 | 628529 | EST | uncoupling protein 3 (mitochondrial, | AA192136 | Hs.76640 |
| | | | proton carrier) | | |
| 975 | 197932 | UQCRB | UQCRB | R96352 | Hs.77385 |
| 976 | 197932 | UQCRB | UQCRB | R96395 | Hs.77385 |
| 977 | 49464 | UNG | uracil-DNA glycosylase | H15111 | Hs.78853 |
| 978 | 49464 | UNG | uracil-DNA glycosylase | H15112 | Hs.78853 |
| 979 | 760148 | UROD | Uroporphyrinogen decarboxylase | AA424441 | Hs.78601 |
| 980 | 760148 | UROD | Uroporphyrinogen decarboxylase | AA424344 | Hs.78601 |
| 981 | 34778 | VEGF | vascular endothelial growth factor | R45059 | |
| 982 | 34778 | VEGF | vascular endothelial growth factor | R19956 | |
| 983 | 1762200 | VDAC1 | VDAC1 | AI205945 | |
| 984 | 1911533 | VDAC3 | VDAC3 | AI268057 | |
| 985 | 486221 | VDAC1 | Voltage-dependent anion channel 1 | AA044059 | Hs.149155 |
| 986 | 486221 | VDAC1 | Voltage-dependent anion channel 1 | AA044113 | Hs.149155 |
| 987 | 1434908 | VDAC2 | Voltage-dependent anion channel 2 | AA857093 | Hs.78902 |
| 988 | 796759 | VDAC3 | voltage-dependent anion channel 3 | AA460728 | Hs.7381 |
| 989 | 796759 | VDAC3 | voltage-dependent anion channel 3 | AA460900 | Hs.7381 |
| 990 | 815683 | WBSCR9 | Williams-Beuren syndrome chromosome | AA485132 | Hs.194688 |
| | | | region 9 | | |
| 991 | 815683 | WBSCR9 | Williams-Beuren syndrome chromosome | AA485131 | Hs.194688 |
| | | | region 9 | | |
| 992 | 878676 | XRCC5 | X-ray repair complementing defective | AA775355 | Hs.84981 |
| | | | repair in Chinese hamster cells 5 (double- | | |
| | | | strand-break rejoining; Ku autoantigen, | | |
| | | | 80 kD) | | |
| 993 | 269381 | ZNF148 | zinc finger protein 148 (pHZ-52) | N26148 | |
| 994 | 745503 | ZNF9 | zinc finger protein 9 (a cellular retroviral | AA625995 | Hs.2110 |
| | | | nucleic acid binding protein) | | |

### Example 2

Mouse Mitochondrial Biology Array

[0083] A mouse mitochondrial biology array is made from clones representing expressed sequences. The clones placed on the array are shown in Table 4 which references sequence ID NOS:995-3040 provided herein setting forth the 5′ and 3′ sequences from these clones. See Tanaka, T. S. et al., (2000) “Genome-wide expression profiling of mid-gestation placenta and embryo using 15 k mouse developmental cDNA microarray” Proc. Natl. Acad. Sci. USA 97:9127-9132. Equivalent clones useful as probes are listed in Table 5. The clones listed in Table 4 are preferable to the clones listed in Table 5. The clones identified in Table 4 are used to make a set of probes called Mouse Probe Set #2. The clones identified in Table 5 are used to make a set of probes called Mouse Probe Set #3. Control sequences are also placed this array. Controls include, but are not limited to blanks, DMSO, probes derived from plant sequences, sequence(s) not involved in mitochondrial biology, and poly adenine (40-60 nucleotides long). Sequences used to make probes for the mouse mitochondrial genes can also be found in GenBank Accession No. J01420, which provides the complete mouse mitochondrial genome. Preferably, the probes used for ATP8 and ATP6 do not cross-hybridize with each other.

TABLE 4

| SEQ ID NO: | NIA Clone No. | Gene | Clone_description | GenBank Accession No. | Unigene Cluster ID | Function |
|---|---|---|---|---|---|---|
| 995 | H3001A07 | Mm.42805 | | | Mm.42805 | Energy/Metabolism |
| 996 | H3001C04 | major histocompatibility locus class III | Mus musculus major histocompatibility | | Mm.7447 | Transcription/Chromatin |
| 997 | | region: butyrophilin-like protein gene, | locus class III region: butyrophilin-like | | | |
| | | partial cds; Notch4, PBX2, RAGE, | protein gene, partial cds; Notch4, | | | |
| | | lysophatidic acid acyl transferase-alpha, | PBX2, RAGE, lysophatidic acid acyl | | | |
| | | palmitoyl-protein thioestera | transferase-alpha, palmitoyl-protein thioestera | | | |
| 998 | H3001F12 | heparan sulfate (glucosamine) 3-O- | Mus musculus heparan sulfate | BG063066 | Mm.100135 | Energy/Metabolism |
| 999 | | sulfotransferase 1 (Hs3st1), | (glucosamine) 3-O-sulfotransferase 1 | | | |
| | | | (Hs3st1), mRNA | | | |
| 1000 | H3001H04 | Rat farnesyltransferase beta subunit | Rat farnesyltransferase beta subunit | BG076556 | Mm.28696 | Energy/Metabolism |
| 1001 | | | mRNA, complete cds | | | |
| 1002 | H3001H05 | CPN10-like protein (Cpn10-rs1) gene | Mus musculus CPN10-like protein | BG063078 | Mm.12970 | Heat Shock/Stress |
| 1003 | | | (Cpn10-rs1) gene, complete cds | | | |
| 1004 | H3002A01 | NADH dehydrogenase (ubiquinone) 1 | Homo sapiens NADH dehydrogenase | BG076562 | Mm.29683 | Energy/Metabolism |
| 1005 | | beta subcomplex, 7 (18 kD, B18) | (ubiquinone) 1 beta subcomplex, 7 | | | |
| | | (NDUFB7), | (18 kD, B18) (NDUFB7), mRNA | | | |
| 1006 | H3002B09 | cytochrome c gene (MC1) | Mouse cytochrome c gene (MC1) | BG063100 | Mm.35389 | Energy/Metabolism |
| 1007 | | | | | | |
| 1008 | H3002D03 | gene prolyl oligopeptidase, exon 11, 12, 13, 14, | Mus musculus gene for prolyl | BG062950 | Mm.90005 | Energy/Metabolism |
| 1009 | | 15 and cds | oligopeptidase, exon 11, 12, 13, 14, 15 | | | |
| | | | and complete cds | | | |
| 1010 | H3002E05 | “Mus musculus RAB1, member RAS | | BG076435 | Mm.14530 | Signal Transduction |
| 1011 | | oncogene family (Rab1), mRNA” | | | | |
| 1012 | H3002E06 | dihydrolipoamide branched chain | Mus musculus dihydrolipoamide | BG076436 | Mm.3636 | Energy/Metabolism |
| 1013 | | transacylase E2 (Dbt), | branched chain transacylase E2 (Dbt), mRNA | | | |
| 1014 | H3002E12 | “Mus musculus aurora-related kinase 2 | | BG076440 | Mm.3488 | Signal Transduction |
| 1015 | | (ARK2) mRNA, complete cds” | | | | |
| 1016 | H3002G11 | glutamate-cysteine ligase catalytic | Mus musculus glutamate-cysteine | BG076460 | Mm.4368 | Energy/Metabolism |
| 1017 | | subunit (GLCLC) | ligase catalytic subunit (GLCLC) | | | |
| | | | mRNA, complete cds | | | |
| 1018 | H3003D05 | DHPS | Homo sapiens deoxyhypusine synthase | BG063127 | Mm.28091 | Energy/Metabolism |
| 1019 | | | (DHPS), mRNA | | | |
| 1020 | H3003D08 | BAG2 | Homo sapiens BCL2-associated | BG076597 | Mm.22449 | Apoptosis |
| 1021 | | | athanogene 2 (BAG2), mRNA | | | |
| 1022 | H3003F02 | ribonucleotide reductase | Mouse DNA for M2 subunit of mouse | BG076613 | Mm.99 | Energy/Metabolism |
| 1023 | | | ribonucleotide reductase (EC 1.17.4.1) | | | |
| 1024 | H3003F06 | GluDH | Mus musculus glutamate dehydrogenase | BG076616 | Mm.10600 | Energy/Metabolism |
| 1025 | | | (Glud), mRNA | | | |
| 1026 | H3003F07 | “Mus musculus calmodulin (Calm), | | BG076617 | Mm.2648 | Signal Transduction |
| 1027 | | mRNA” | | | | |
| 1028 | H3003H01 | “Mus musculus adenylate cyclase 7 | | BG076632 | Mm.141400 | Signal Transduction |
| 1029 | | (Adcy7), mRNA” | | | | |
| 1030 | H3004A02 | ISCU1 (ISCU), alternatively spliced | Homo sapiens ISCU1 (ISCU) mRNA, | BG076641 | Mm.29497 | Energy/Metabolism |
| 1031 | | | complete cds, alternatively spliced | | | |
| 1032 | H3004A04 | mannosyl (alpha-1,3-)-glycoprotein | Homo sapiens mannosyl (alpha-1,3-)- | BG076643 | Mm.86759 | Energy/Metabolism |
| 1033 | | beta-1,4-N- | glycoprotein beta-1,4-N- | | | |
| | | acetylglucosaminyltransferase, | acetylglucosaminyltransferase, | | | |
| | | isoenzyme B (MGAT4B), | isoenzyme B (MGAT4B), mRNA | | | |
| 1034 | H3004A09 | sarco(endo)plasmic reticulum calcium | Mus musculus sarco(endo)plasmic | BG076647 | Mm.100531 | Energy/Metabolism |
| 1035 | | ATPase (SERCA2) gene, promoter | reticulum calcium ATPase (SERCA2) | | | |
| | | region, exons 1-3, and partial cds | gene, promoter region, exons 1-3, and | | | |
| | | | partial cds | | | |
| 1036 | H3004B06 | “Mouse mRNA for peripheral-type | | BG076653 | Mm.1508 | Signal Transduction |
| 1037 | | benzodiazepine receptor, complete cds” | | | | |
| 1038 | H3004C06 | | | | Mm.34776 | Heat Shock/Stress |
| 1039 | | | | | | |
| 1040 | H3004E03 | “Mus musculus group V phospholipase | | BG063219 | Mm.153446 | Signal Transduction |
| 1041 | | A2 mRNA, complete cds” | | | | |
| 1042 | H3004F07 | “Mus musculus protein tyrosine | | BG076689 | Mm.6355 | Signal Transduction |
| 1043 | | phosphatase 4a2 (Ptp4a2), mRNA” | | | | |
| 1044 | H3004G09 | orotidine-5-monophosphate | Mouse orotidine-5-monophosphate | BG076701 | Mm.13145 | Energy/Metabolism |
| 1045 | | decarboxylase, 3 end | decarboxylase mRNA, 3 end | | | |
| 1046 | H3004H01 | TF-1 apoptosis related protein 19 | Mus musculus TF-1 apoptosis related | BG076705 | Mm.21650 | Apoptosis |
| 1047 | | (Tfar19), | protein 19 (Tfar19), mRNA | | | |
| 1048 | H3004H06 | protein arginine N-methyltransferase 1 | Mus musculus protein arginine N- | BG076710 | Mm.27545 | Energy/Metabolism |
| 1049 | | (Mrmt1), alternatively spliced | methyltransferase 1 (Mrmt1) mRNA, | | | |
| | | | complete cds, alternatively spliced | | | |
| 1050 | H3005A04 | H19 and muscle-specific Nctc1 genes, | Mus musculus H19 and muscle-specific | BG076718 | Mm.12970 | Protein |
| 1051 | | sequence | Nctc1 genes, complete sequence | | | Synthesis/Translational |
| | | | | | | Control |
| 1052 | H3005A06 | “Mus musculus mammalian relative of | | BG076720 | Mm.2701 | Heat Shock/Stress |
| 1053 | | DnaJ (Mrj-pending), mRNA” | | | | |
| 1054 | H3005B03 | thioredoxin reductase 1 (Txnrd1), | Mus musculus thioredoxin reductase 1 | BG076728 | Mm.44552 | Energy/Metabolism |
| 1055 | | | (Txnrd1), mRNA | | | |
| 1056 | H3005B06 | amidophosphoribosyltransferase | Rattus norvegicus mRNA for | BG076730 | Mm.27743 | Energy/Metabolism |
| 1057 | | | amidophosphoribosyltransferase | | | |
| 1058 | H3005D01 | dipeptidylpeptidase 4 (Dpp4), | Mus musculus dipeptidylpeptidase 4 | BG076746 | Mm.1151 | Energy/Metabolism |
| 1059 | | | (Dpp4), mRNA | | | |
| 1060 | H3005D03 | orotidine-5-monophosphate | Mouse orotidine-5-monophosphate | BG076748 | Mm.802 | Energy/Metabolism |
| 1061 | | decarboxylase, 3 end | decarboxylase mRNA, 3 end | | | |
| 1062 | H3005E09 | “Homo sapiens antiquitin 1 (ATQ1), | | BG076761 | Mm.30250 | Signal Transduction |
| 1063 | | mRNA” | | | | |
| 1064 | H3005E10 | M. musculus sodium/potassium ATPase | M. musculus mRNA for | BG076762 | Mm.4550 | Energy/Metabolism |
| 1065 | | beta subunit | sodium/potassium ATPase beta subunit | | | |
| 1066 | H3005F06 | “Mus musculus pelle-like protein | | BG076768 | Mm.38241 | Signal Transduction |
| 1067 | | kinase mRNA, complete cds” | | | | |
| 1068 | H3005G01 | glycerol-3-phosphate dehydrogenase | Mouse mRNA for glycerol-3-phosphate | BG076772 | Mm.3711 | Energy/Metabolism |
| 1069 | | | dehydrogenase, complete cds | | | |
| 1070 | H3005G06 | peptidylprolyl isomerase B (Ppib), | Mus musculus peptidylprolyl isomerase | BG076776 | Mm.2412 | Energy/Metabolism |
| 1071 | | | B (Ppib), mRNA | | | |
| 1072 | H3005G12 | methionyl tRNA synthetase | Homo sapiens mRNA for methionyl | BG063326 | Mm.28173 | Energy/Metabolism |
| 1073 | | | tRNA synthetase, complete cds | | | |
| 1074 | H3006E03 | cytochrome c-1 gene | Human cytochrome c-1 gene, complete | BG076814 | Mm.29196 | Apoptosis |
| 1075 | | | cds | | | |
| 1076 | H3006E12 | UDP-glucose: glycoprotein | Homo sapiens UDP- | BG076821 | Mm.45651 | Energy/Metabolism |
| 1077 | | glucosyltransferase 1 (HUGT1), | glucose: glycoprotein | | | |
| | | | glucosyltransferase 1 (HUGT1), mRNA | | | |
| 1078 | H3006G03 | puromycin-sensitive aminopeptidase | Mus musculus puromycin-sensitive | BG076835 | Mm.29824 | Energy/Metabolism |
| 1079 | | (Psa), | aminopeptidase (Psa), mRNA | | | |
| 1080 | H3006H05 | “Mus musculus calmodulin synthesis | | BG076847 | Mm.18041 | Signal Transduction |
| 1081 | | (CaM) cDNA, complete cds” | | | | |
| 1082 | H3006H10 | “Mus musculus circadian locomoter | | BG063409 | Mm.3552 | Signal Transduction |
| 1083 | | output cycles kaput (Clock), mRNA” | | | | |
| 1084 | H3007E02 | glutathione S-transferase pi class | Mus musculus glutathione S-transferase | BG076872 | Mm.426 | Energy/Metabolism |
| 1085 | | (mGSTpiA) and (mGSTpiB) genes | pi class (mGSTpiA) and (mGSTpiB) | | | |
| | | | genes, complete cds | | | |
| 1086 | H3007G07 | Mm.29713 | | | Mm.29713 | Energy/Metabolism |
| 1087 | | | | | | |
| 1088 | H3007G08 | histidyl tRNA synthetase (Hars), | Mus musculus histidyl tRNA synthetase | BG076882 | Mm.10528 | Energy/Metabolism |
| 1089 | | | (Hars), mRNA | | | |
| 1090 | H3008A02 | H. sapiens gene 2-oxoglutarate carrier | H. sapiens gene for 2-oxoglutarate | BG076887 | Mm.28466 | Energy/Metabolism |
| 1091 | | protein | carrier protein | | | |
| 1092 | H3008A05 | Mus musculus GTP-binding protein | | BG076890 | Mm.6698 | Signal Transduction |
| 1093 | | (mSara) homologue mRNA, complete | | | | |
| | | cds | | | | |
| 1094 | H3008B05 | Mus musculus dystroglycan 1 (DAG1) | | BG063514 | Mm.7524 | Matrix/Structural |
| 1095 | | gene, exons 1 and 2 and complete cds | | | | Proteins |
| 1096 | H3008B06 | ferritin heavy chain (Fth), | Mus musculus ferritin heavy chain | BG063515 | Mm.1776 | Energy/Metabolism |
| 1097 | | | (Fth), mRNA | | | |
| 1098 | H3008B07 | H3008B07 | | | | Energy/Metabolism |
| 1099 | | | | | | |
| 1100 | H3008B10 | ATPase, H+ transporting, lysosomal I | Mus musculus ATPase, H+ | BG063518 | Mm.19185 | Energy/Metabolism |
| 1101 | | (Atp6i), | transporting, lysosomal I (Atp6i), mRNA | | | |
| 1102 | H3008C02 | “Mus musculus PKCq-interacting | | BG076907 | Mm.29675 | Signal Transduction |
| 1103 | | protein PICOT (PICOT) mRNA, | | | | |
| | | complete cds” | | | | |
| 1104 | H3008C07 | tryptophan-2,3-dioxygenase (TDO), | Mus musculus tryptophan-2,3- | BG076911 | Mm.21545 | Energy/Metabolism |
| 1105 | | | dioxygenase (TDO), mRNA | | | |
| 1106 | H3008C09 | “HSP90 = heat shock protein [mice, | | AW538216 | Mm.2180 | Heat Shock/Stress |
| 1107 | | heart, mRNA Partial, 806 nt]” | | | | |
| 1108 | H3008C12 | adenylosuccinate lyase (Adsl), | Mus musculus adenylosuccinate lyase | BG076914 | Mm.38151 | Energy/Metabolism |
| 1109 | | | | (Adsl), mRNA | | |
| 1110 | H3008D12 | H3008D12 | | | | Energy/Metabolism |
| 1111 | | | | | | |
| 1112 | H3008E02 | “Mus musculus caseinolytic protease, | | BG076923 | Mm.15243 | Signal Transduction |
| 1113 | | ATP-dependent, (E. coli) proteolytic | | | | |
| | | subunit homolog (Clpp), mRNA” | | | | |
| 1114 | H3008F09 | Mm.3991 | | | Mm.3991 | Energy/Metabolism |
| 1115 | | | | | | |
| 1116 | H3008G05 | Btk locus, alpha-D-galactosidase A | Mus musculus Btk locus, alpha-D- | | Mm.30034 | Matrix/Structural |
| 1117 | | (Ags), ribosomal protein (L44L), and | galactosidase A (Ags), ribosomal | | | Proteins |
| | | Brutons tyrosine kinase (Btk) genes | protein (L44L), and Brutons tyrosine | | | |
| | | | kinase (Btk) genes, complete cds | | | |
| 1118 | H3008H06 | M. musculus gene cathepsin D, exons 6-9 | M. musculus gene for cathepsin D, exons | AW538365 | | Apoptosis |
| 1119 | | | 6-9 | | | |
| 1120 | H3008H07 | serine palmitoyl transferase, subunit II | Homo sapiens serine palmitoyl | | Mm.29034 | |
| 1121 | | gene; and unknown genes | transferase, subunit II gene, complete | | | |
| | | | cds; and unknown genes | | | |
| 1122 | H3009A09 | Slc20a1 | Mus musculus gibbon ape leukemia | BG063583 | Mm.16757 | Energy/Metabolism |
| 1123 | | | virus receptor (Slc20a1) gene, exon 10 | | | |
| | | | and complete cds | | | |
| 1124 | H3009B04 | Fen1 | Mus musculus flap structure specific | BG063590 | Mm.2952 | Energy/Metabolism |
| 1125 | | | endonuclease 1 (Fen1), mRNA | | | |
| 1126 | H3009C03 | Tgm1 | Mus musculus transglutaminase 1, K | BG076966 | Mm.41964 | Energy/Metabolism |
| 1127 | | | polypeptide (Tgm1), mRNA | | | |
| 1128 | H3009C07 | “Mus musculus heat shock protein, 86 kDa | | BG063605 | Mm.1843 | Heat Shock/Stress |
| 1129 | | 1 (Hsp86-1), mRNA” | | | | |
| 1130 | H3009D02 | ATPase delta | Rattus norvegicus delta subunit of F1F0 | BG076975 | Mm.22514 | Energy/Metabolism |
| 1131 | | | ATPase gene, complete cds | | | |
| 1132 | H3009E08 | Cox8a | Mus musculus cytochrome c oxidase, | BG076988 | Mm.14022 | Energy/Metabolism |
| 1133 | | | subunit VIIIa (Cox8a), mRNA | | | |
| 1134 | H3009G03 | “Mus musculus lithium-sensitive myoinositol | | BG063641 | Mm.8089 | Signal Transduction |
| 1135 | | monophosphatase A1 (IMPA1) | | | | |
| | | mRNA, complete cds” | | | | |
| 1136 | H3010C12 | mannosyl (alpha-1,6-)-glycoprotein | Homo sapiens mannosyl (alpha-1,6-)- | BG077070 | Mm.24293 | Energy/Metabolism |
| 1137 | | beta-1,2-N- | glycoprotein beta-1,2-N- | | | |
| | | acetylglucosaminyltransferase | acetylglucosaminyltransferase | | | |
| | | (MGAT2), | (MGAT2), mRNA | | | |
| 1138 | H3010D10 | tumor necrosis factor alpha converting | Mus musculus tumor necrosis factor | BG077079 | Mm.105014 | Apoptosis |
| 1139 | | enzyme (TACE) gene, exon 3, sequence | alpha converting enzyme (TACE) gene, | | | |
| | | | exon 3, complete sequence | | | |
| 1140 | H3010F06 | H3010F06 | | | | Energy/Metabolism |
| 1141 | | | | | | |
| 1142 | H3010F07 | programmed cell death 6 interacting | Mus musculus programmed cell death 6 | BG077095 | Mm.29816 | Apoptosis |
| 1143 | | protein (Pdcd6ip), | interacting protein (Pdcd6ip), mRNA | | | |
| 1144 | H3011A03 | protein-L-isoaspartate (D-aspartate) O- | Mus musculus protein-L-isoaspartate | BG077121 | Mm.25293 | Energy/Metabolism |
| 1145 | | methyltransferase 1 (Pcmt1), | (D-aspartate) O-methyltransferase 1 | | | |
| | | | (Pcmt1), mRNA | | | |
| 1146 | H3011B01 | H. sapiens mitogen inducible gene mig-2 | H. sapiens mitogen inducible gene mig- | | Mm.29842 | Signal Transduction |
| 1147 | | | 2, complete CDS | | | |
| 1148 | H3011C08 | H3011C08 | | | | Energy/Metabolism |
| 1149 | | | | | | |
| 1150 | H3011E06 | mTim17a | | | Mm.2368 | |
| 1151 | | | | | | |
| 1152 | H3011E10 | Sid329 (Sid329), | Mus musculus Sid329 (Sid329), mRNA | | Mm.21743 | |
| 1153 | | | | | | |
| 1154 | H3011H09 | “House mouse mRNA for MAP kinase | | BG077180 | Mm.57203 | Signal Transduction |
| 1155 | | kinase 3b, complete cds” | | | | |
| 1156 | H3012A05 | serine palmitoyl transferase | Homo sapiens serine palmitoyl | | | |
| 1157 | | | transferase, subunit II gene, complete | | | |
| | | | cds; and unknown genes | | | |
| 1158 | H3012A07 | “Mus musculus heat shock 70 protein | | BG077186 | Mm.34184 | Heat Shock/Stress |
| 1159 | | (Hsc70) gene, complete cds” | | | | |
| 1160 | H3012C06 | “Mus musculus scavenger receptor class | | BG077202 | Mm.4603 | Heat Shock/Stress |
| 1161 | | B type I (mSR-BI) mRNA, complete | | | | |
| | | cds” | | | | |
| 1162 | H3012F03 | GLO1 | Homo sapiens glyoxalase I (GLO1), | BG077218 | Mm.17362 | Energy/Metabolism |
| 1163 | | | mRNA | | | |
| 1164 | H3012F10 | “Mus musculus c-src tyrosine kinase | | BG077222 | Mm.21974 | Signal Transduction |
| 1165 | | (Csk), mRNA” | | | | |
| 1166 | H3012H04 | “Mus musculus protein kinase Lkb1 | | BG063794 | Mm.29947 | Signal Transduction |
| 1167 | | (Lkb1) and R29144/1 genes, partial cds” | | | | |
| 1168 | H3013B02 | M. musculus vacuolar adenosine | M. musculus mRNA for vacuolar | BG077252 | Mm.10727 | Energy/Metabolism |
| 1169 | | triphosphatase subunit B | adenosine triphosphatase subunit B | | | |
| 1170 | H3013B08 | pyridoxal (pyridoxine, vitamin B6) | Homo sapiens pyridoxal (pyridoxine, | BG063905 | Mm.26103 | Energy/Metabolism |
| | | kinase (PDXK), | vitamin B6) kinase (PDXK), mRNA | | | |
| 1171 | H3013C04 | “Mus musculus mRNA, complete cds” | | AW539669 | Mm.9846 | Heat Shock/Stress |
| 1172 | | | | | | |
| 1173 | H3013D03 | “Mus musculus RAB10, member RAS | | BG077272 | Mm.21985 | Signal Transduction |
| 1174 | | oncogene family (Rab10), mRNA” | | | | |
| 1175 | H3013D11 | Mouse metallothionein II (MT-II) gene | | BG063925 | Mm.89170 | Heat Shock/Stress |
| 1176 | | | | | | |
| 1177 | H3013E04 | adenylyl cyclase-associated protein | Homo sapiens adenylyl cyclase- | | Mm.43660 | |
| 1178 | | (CAP), | associated protein (CAP), mRNA | | | |
| 1179 | H3013E07 | dolichyl-phosphate alpha-N- | Mus musculus dolichyl-phosphate | BG063933 | Mm.18353 | Energy/Metabolism |
| 1180 | | acetylglucosaminephosphotransferase 2 | alpha-N- | | | |
| | | (Dpagt2), | acetylglucosaminephosphotransferase 2 | | | |
| | | | (Dpagt2), mRNA | | | |
| 1181 | H3013F01 | delta-aminolevulinate dehydratase (Lv), | Mus musculus delta-aminolevulinate | BG063937 | Mm.6988 | Energy/Metabolism |
| 1182 | | | dehydratase (Lv), mRNA | | | |
| 1183 | H3013F02 | “Mus musculus aurora-related kinase 1 | | BG077290 | Mm.11738 | Signal Transduction |
| 1184 | | (ARK1) mRNA, complete cds” | | | | |
| 1185 | H3013G10 | survivin40, survivin121, and | Mus musculus survivin40, survivin121, | BG077309 | Mm.8552 | Apoptosis |
| 1186 | | survivin140 genes, alternative splice | and survivin140 genes, alternative splice | | | |
| | | products | products, complete cds | | | |
| 1187 | H3014A05 | partial aminopeptidase B (APB gene) | Homo sapiens partial mRNA for | BG077324 | Mm.29706 | Energy/Metabolism |
| 1188 | | | aminopeptidase B (APB gene) | | | |
| 1189 | H3014A06 | “Rattus norvegicus protein associating | | | Mm.45272 | Heat Shock/Stress |
| | | with small stress protein PASS1 (Pass1) | | | | |
| | | mRNA, complete cds” | | | | |
| 1190 | H3014A11 | queuine tRNA-ribosyltransferase | Mus musculus queuine tRNA- | BG077329 | Mm.24178 | Energy/Metabolism |
| 1191 | | (LOC60507), | ribosyltransferase (LOC60507), mRNA | | | |
| 1192 | H3014B06 | Mm.29849 | | | Mm.29849 | Energy/Metabolism |
| 1193 | | | | | | |
| 1194 | H3014C08 | Mus musculus surfeit gene 4 (Surf4), | | BG063996 | Mm.2795 | |
| 1195 | | mRNA | | | | |
| 1196 | H3014C10 | | | | | Heat Shock/Stress |
| 1197 | | | | | | |
| 1198 | H3014C12 | solute carrier family 28 (sodium- | Mus musculus solute carrier family 28 | BG077361 | Mm.29510 | Energy/Metabolism |
| 1199 | | coupled nucleoside transporter), | (sodium-coupled nucleoside | | | |
| | | member 2 (Slc28a2), | transporter), member 2 (Slc28a2), | | | |
| | | | mRNA | | | |
| 1200 | H3014E06 | UDP-Gal: betaGlcNAc beta 1,3- | Mus musculus UDP-Gal: betaGlcNAc | BG077355 | Mm.11132 | Energy/Metabolism |
| 1201 | | galactosyltransferase, polypeptide 4 | beta 1,3-galactosyltransferase, | | | |
| | | (B3galt4), | polypeptide 4 (B3galt4), mRNA | | | |
| 1202 | H3014E07 | signal peptidase 21 kDa subunit | Rattus norvegicus mRNA for signal | BG077356 | Mm.27800 | Energy/Metabolism |
| 1203 | | | peptidase 21 kDa subunit, complete cds | | | |
| 1204 | H3014F05 | “Mus musculus S100 calcium-binding | | | Mm.6523 | Signal Transduction |
| | | protein A13 (S100a13), mRNA” | | | | |
| 1205 | H3014F06 | UDP-Gal: betaGlcNAc beta 1,4- | Mus musculus UDP-Gal: betaGlcNAc | BG077374 | Mm.15622 | Energy/Metabolism |
| 1206 | | galactosyltransferase, polypeptide 1 | beta 1,4-galactosyltransferase, | | | |
| | | (B4galt1), | polypeptide 1 (B4galt1), mRNA | | | |
| 1207 | H3014G07 | phosphoprotein enriched in astrocytes | Mus musculus phosphoprotein enriched | BG064035 | Mm.544 | Apoptosis |
| 1208 | | 15 (Pea15), | in astrocytes 15 (Pea15), mRNA | | | |
| 1209 | H3014G08 | protease (prosome, macropain) 26S | Mus musculus protease (prosome, | BG077385 | Mm.665 | Energy/Metabolism |
| 1210 | | subunit, ATPase 5 (Psmc5), | macropain) 26S subunit, ATPase 5 | | | |
| | | | (Psmc5), mRNA | | | |
| 1211 | H3014G09 | protease (prosome, macropain) 26S | Mus musculus protease (prosome, | | Mm.665 | Energy/Metabolism |
| 1212 | | subunit, ATPase 5 (Psmc5), | macropain) 26S subunit, ATPase 5 | | | |
| | | | (Psmc5), mRNA | | | |
| 1213 | H3014H07 | tyrosyl-tRNA synthetase (YARS), | Homo sapiens tyrosyl-tRNA synthetase (YARS), | BG077395 | Mm.20353 | Energy/Metabolism |
| 1214 | | | mRNA | | | |
| 1215 | H3015A01 | major histocompatibility locus class III | Mus musculus major histocompatibility | | Mm.27416 | |
| 1216 | | region: butyrophilin-like protein gene, | locus class III region: butyrophilin-like | | | |
| | | partial cds; Notch4, PBX2, RAGE, | protein gene, partial cds; Notch4, | | | |
| | | lysophatidic acid acyl transferase-alpha, | PBX2, RAGE, lysophatidic acid acyl | | | |
| | | palmitoyl-protein thioestera | transferase-alpha, palmitoyl-protein | | | |
| | | | thioestera | | | |
| 1217 | H3015B03 | hypothetical protein FLJ10535 | Homo sapiens hypothetical protein | BG077413 | Mm.24187 | Energy/Metabolism |
| 1218 | | (FLJ10535), | FLJ10535 (FLJ10535), mRNA | | | |
| 1219 | H3015C02 | methionine adenosyltransferase alpha | Homo sapiens methionine | BG064075 | Mm.29815 | Energy/Metabolism |
| 1220 | | subunit gene fragment | adenosyltransferase alpha subunit gene | | | |
| | | | fragment | | | |
| 1221 | H3015D05 | MSTP029 | Homo sapiens MSTP029 mRNA, | BG077438 | Mm.30147 | Energy/Metabolism |
| 1222 | | | complete cds | | | |
| 1223 | H3015E06 | Tnf receptor-associated factor 1 (Traf1), | Mus musculus Tnf receptor-associated | BG064103 | Mm.12898 | Apoptosis |
| 1224 | | | factor 1 (Traf1), mRNA | | | |
| 1225 | H3016C10 | | | | | Heat Shock/Stress |
| 1226 | | | | | | |
| 1227 | H3016D01 | Mm.20201 | | | Mm.20201 | Energy/Metabolism |
| 1228 | | | | | | |
| 1229 | H3016D08 | BCL2/adenovirus E1B 19 kDa- | Mus musculus BCL2/adenovirus E1B | BG077518 | Mm.29820 | Apoptosis |
| 1230 | | interacting protein 3-like (Bnip31), | 19 kDa-interacting protein 3-like | | | |
| | | | (Bnip31), mRNA | | | |
| 1231 | H3016E10 | Mus musculus mG28K mRNA for | | BG077528 | Mm.28954 | |
| 1232 | | GTP-binding protein like 1, complete | | | | |
| | | cds | | | | |
| 1233 | H3016F03 | Tim44 | Rattus norvegicus mRNA for Tim44, | | Mm.34791 | Matrix/Structural |
| 1234 | | | complete cds | | | Proteins |
| 1235 | H3016F07 | M. musculus glutamyl-tRNA synthetase | M. musculus mRNA for glutamyl-tRNA | BG064194 | Mm.27190 | Energy/Metabolism |
| 1236 | | | synthetase | | | |
| 1237 | H3016F11 | | | | | Heat Shock/Stress |
| 1238 | H3017A02 | ornithine decarboxylase antizyme 2 | Mus musculus ornithine decarboxylase | BG077570 | Mm.675 | Energy/Metabolism |
| 1239 | | (Oaz2), | antizyme 2 (Oaz2), mRNA | | | |
| 1240 | H3017C11 | “Mus musculus RAN guanine | | BG077598 | Mm.143774 | Signal Transduction |
| 1241 | | nucleotide release factor (Rangnrf- | | | | |
| | | pending), mRNA” | | | | |
| 1242 | H3017D04 | “Homo sapiens hect (homologous to the | | BG064250 | Mm.102717 | Heat Shock/Stress |
| 1243 | | E6-AP (UBE3A) carboxyl terminus) | | | | |
| | | domain and RCC1 (CHC1)-like domain | | | | |
| | | (RLD) 1 (HERC1), mRNA” | | | | |
| 1244 | H3017E04 | “Mus musculus cathepsin Z precursor | | BG077611 | Mm.115 | Signal Transduction |
| 1245 | | (Ctsz) mRNA, complete cds” | | | | |
| 1246 | H3017E11 | “Mus musculus retinoblastoma binding | | AW544081 | Mm.1603 | Heat Shock/Stress |
| 1247 | | protein 7 (Rbbp7), mRNA” | | | | |
| 1248 | H3017G06 | phenylalanyl tRNA synthetase beta | Mus musculus phenylalanyl tRNA | BG077633 | Mm.28922 | Energy/Metabolism |
| 1249 | | subunit (Frsb) | synthetase beta subunit (Frsb) mRNA, | | | |
| | | | complete cds | | | |
| 1250 | H3018A02 | B4galt3 | Mus musculus beta-1,4- | BG077551 | Mm.150720 | Energy/Metabolism |
| 1251 | | | galactosyltransferase III (B4galt3), | | | |
| | | | mRNA | | | |
| 1252 | H3018A04 | APB | Homo sapiens partial mRNA for | BG077553 | | Energy/Metabolism |
| 1253 | | | aminopeptidase B (APB gene) | | | |
| 1254 | H3018A08 | “Mus musculus Cctq gene for | | BG064304 | Mm.17989 | Heat Shock/Stress |
| 1255 | | chaperonin containing TCP-1 theta | | | | |
| | | subunit, complete cds” | | | | |
| 1256 | H3018A11 | Cyp17 | Mus musculus cytochrome P450, 17 | BG064307 | Mm.1262 | Energy/Metabolism |
| 1257 | | | (Cyp17), mRNA | | | |
| 1258 | H3018B08 | thimet oligopeptidase | Mus musculus thimet oligopeptidase | BG077656 | Mm.26995 | Energy/Metabolism |
| 1259 | | | mRNA, complete cds | | | |
| 1260 | H3018F06 | | | | | Heat Shock/Stress |
| 1261 | | | | | | |
| 1262 | H3018G08 | UDP-galactose 4 epimerase (GALE) | Homo sapiens UDP-galactose 4 | BG077710 | Mm.20363 | Energy/Metabolism |
| 1263 | | | epimerase (GALE) gene, complete cds | | | |
| 1264 | H3019A07 | ATP binding protein associated with | Homo sapiens ATP binding protein | | Mm.28438 | Energy/Metabolism |
| | | cell differentiation (APACD), | associated with cell differentiation | | | |
| | | | (APACD), mRNA | | | |
| 1265 | H3019B01 | ATPase, Na+/K+ transporting, beta 1 | Mus musculus ATPase, Na+/K+ | BG077733 | Mm.4550 | Energy/Metabolism |
| 1266 | | polypeptide (Atp1b1), | transporting, beta 1 polypeptide | | | |
| | | | (Atp1b1), mRNA | | | |
| 1267 | H3019B03 | acyl-coenzyme A: cholesterol | acyl-coenzyme A: cholesterol | BG077735 | Mm.28099 | Matrix/Structural |
| 1268 | | acyltransferase [mice, peritoneal | acyltransferase [mice, peritoneal | | | Proteins |
| | | macrophages,, 3041 nt] | macrophages, mRNA, 3041 nt] | | | |
| 1269 | H3019B10 | Mus musculus microtubule-associated | | BG077742 | Mm.12625 | Matrix/Structural |
| 1270 | | protein 4 (Mtap4), mRNA | | | | Proteins |
| 1271 | H3019C06 | CGI-107 protein (LOC51012), | Homo sapiens CGI-107 protein | | Mm.30065 | |
| 1272 | | | (LOC51012), mRNA | | | |
| 1273 | H3019C11 | core1 UDP-galactose: N- | Mus musculus core1 UDP-galactose: N- | BG077752 | Mm.102752 | Energy/Metabolism |
| 1274 | | acetylgalactosamine-alpha-R beta 1,3- | acetylgalactosamine-alpha-R beta 1,3- | | | |
| | | galactosyltransferase (C1galt1) | galactosyltransferase (C1galt1) mRNA, | | | |
| | | | complete cds | | | |
| 1275 | H3019C12 | “Mus musculus GTP-binding protein | | BG077753 | Mm.6698 | Signal Transduction |
| 1276 | | (mSara) homologue mRNA, complete | | | | |
| | | cds” | | | | |
| 1277 | H3019D09 | “Mus musculus protein kinase C | | BG077758 | Mm.425 | Signal Transduction |
| 1278 | | inhibitor (mPKCI) mRNA, complete | | | | |
| | | cds” | | | | |
| 1279 | H3019E05 | Mm.38994 | | | Mm.38994 | Energy/Metabolism |
| 1280 | | | | | | |
| 1281 | H3019E12 | F1F0-type ATP synthase subunit d | Homo sapiens F1F0-type ATP synthase | BG077769 | Mm.102755 | Energy/Metabolism |
| 1282 | | | subunit d mRNA, complete cds | | | |
| 1283 | H3019F05 | Mouse tyrosine kinase (c-abl) mRNA | | BG077774 | Mm.1318 | Signal Transduction |
| 1284 | | | | | | |
| 1285 | H3019F06 | domesticus tumor necrosis factor | Mus musculus domesticus mRNA for | BG077775 | Mm.103353 | Apoptosis |
| 1286 | | receptor p60 homologue 1 (Tnfrh1 | tumor necrosis factor receptor p60 | | | |
| | | gene) | homologue 1 (Tnfrh1 gene) | | | |
| 1287 | H3019F07 | “Mus musculus serine/threonine kinase | | BG077776 | Mm.8235 | Signal Transduction |
| 1288 | | 10 (Stk10), mRNA” | | | | |
| 1289 | H3019F10 | phosphomannomutase 2 (Pmm2), | | | | Energy/Metabolism |
| 1290 | | | | | | |
| 1291 | H3019G05 | alkaline phosphatase 2, liver (Akp2), | Mus musculus phosphomannomutase 2 | BG077784 | Mm.9699 | Energy/Metabolism |
| 1292 | | | (Pmm2), mRNA | | | |
| 1293 | H3019H07 | ATPase-like vacuolar proton channel | Mus musculus alkaline phosphatase 2, | BG077796 | Mm.1265 | Energy/Metabolism |
| 1294 | | (Atpl), | liver (Akp2), mRNA | | | |
| 1295 | H3019H11 | H3019F10 | Mus musculus ATPase-like vacuolar | BG077799 | Mm.30155 | Energy/Metabolism |
| 1296 | | | proton channel (Atpl), mRNA | | | |
| 1297 | H3020A02 | nucleoside diphosphatase (ER-UDPase | Mus musculus mRNA for nucleoside | BG077800 | Mm.10211 | Energy/Metabolism |
| 1298 | | gene) | diphosphatase (ER-UDPase gene) | | | |
| 1299 | H3020A07 | serine palmitoyl transferase, subunit II | Homo sapiens serine palmitoyl | | Mm.22626 | |
| 1300 | | gene; and unknown genes | transferase, subunit II gene, complete | | | |
| | | | cds; and unknown genes | | | |
| 1301 | H3020B08 | ferritin light chain 1 (Ftl1), | Mus musculus ferritin light chain 1 | BG077812 | Mm.7500 | Energy/Metabolism |
| 1302 | | | (Ftl1), mRNA | | | |
| 1303 | H3020C02 | “Mouse metallothionein-I (MT-I) gene, | | BG077818 | Mm.2041 | Heat Shock/Stress |
| 1304 | | 5′ end” | | | | |
| 1305 | H3020D10 | isocitrate dehydrogenase 3 (NAD+) | Homo sapiens isocitrate dehydrogenase | BG077913 | Mm.29051 | Energy/Metabolism |
| 1306 | | alpha (IDH3A), | 3 (NAD+) alpha (IDH3A), mRNA | | | |
| 1307 | H3020E01 | “Mus musculus wagneri gene for 105- | | BG064500 | Mm.34828 | Heat Shock/Stress |
| 1308 | | kDa heat shock protein, exon 18 and | | | | |
| | | complete cds” | | | | |
| 1309 | H3020H04 | squalene epoxidase (Sqle), | Mus musculus squalene epoxidase | BG077950 | Mm.22663 | Energy/Metabolism |
| 1310 | | | (Sqle), mRNA | | | |
| 1311 | H3020H07 | BALB/c GDP-dissociation inhibitor | Mus musculus BALB/c GDP- | BG077953 | Mm.28084 | Energy/Metabolism |
| 1312 | | (GDI-1), partial cds | dissociation inhibitor (GDI-1) mRNA, | | | |
| | | | partial cds | | | |
| 1313 | H3020H10 | man 6-P receptor (46MPR) | Mouse man 6-P receptor (46MPR) | BG064540 | Mm.1358 | Energy/Metabolism |
| 1314 | | | mRNA, complete cds | | | |
| 1315 | H3021A02 | programmed cell death 6 (Pdcd6), | Mus musculus programmed cell death 6 | BG077957 | Mm.24254 | Apoptosis |
| 1316 | | | (Pdcd6), mRNA | | | |
| 1317 | H3021A11 | small zinc finger-like protein (Tim13) | Mus musculus small zinc finger-like | BG077964 | Mm.22201 | Energy/Metabolism |
| 1318 | | | protein (Tim13) mRNA, complete cds | | | |
| 1319 | H3021A12 | M. musculus (clone S5) WRS | M. musculus (clone S5) WRS mRNA for | BG077965 | Mm.38433 | Energy/Metabolism |
| 1320 | | tryptophan--tRNA ligase | tryptophan--tRNA ligase | | | |
| 1321 | H3021B05 | M. musculus CI-23 kD gene | M. musculus CI-23 kD gene | BG077969 | Mm.44227 | Energy/Metabolism |
| 1322 | | | | | | |
| 1323 | H3021B08 | mitochondrial carrier peroxisomal | | | Mm.306 | |
| 1324 | | membrane protein, 34 kDa member | | | | |
| | | 17 PMP34 | | | | |
| 1325 | H3021C09 | H3021C09 | | | | Apoptosis |
| 1326 | | | | | | |
| 1327 | H3021D07 | “Mus musculus proliferin related protein | | BG077825 | Mm.3258 | Signal Transduction |
| 1328 | | (Plfr), mRNA” | | | | |
| 1329 | H3021E11 | vacuolar adenosine triphosphatase | Mus musculus vacuolar adenosine | BG064589 | Mm.29771 | Energy/Metabolism |
| 1330 | | subunit A gene | triphosphatase subunit A gene, complete | | | |
| | | | cds | | | |
| 1331 | H3021F01 | aspartyl aminopeptidase (Dnpep), | Mus musculus aspartyl aminopeptidase | BG077839 | Mm.24680 | Energy/Metabolism |
| 1332 | | | (Dnpep), mRNA | | | |
| 1333 | H3021F08 | “Mus musculus chaperonin subunit 7 | | BG077843 | Mm.914 | Heat Shock/Stress |
| 1334 | | (eta) (Cct7), mRNA” | | | | |
| 1335 | H3021G03 | “Mus musculus serine/threonine protein | | BG077848 | Mm.1970 | Signal Transduction |
| 1336 | | phosphatase type 1 alpha mRNA, | | | | |
| | | complete cds” | | | | |
| 1337 | H3021H03 | “Mus musculus Ras suppressor protein 1 | | BG077860 | Mm.905 | Signal Transduction |
| 1338 | | (Rsu1), mRNA” | | | | |
| 1339 | H3022A04 | Cricetulus griseus | Cricetulus griseus mRNA for | BG064623 | Mm.28864 | Energy/Metabolism |
| 1340 | | Phosphatidylglycerophosphate synthase | Phosphatidylglycerophosphate synthase, | | | |
| | | | complete cds | | | |
| 1341 | H3022A05 | “Mus musculus RAB23, member RAS | | BG077872 | Mm.40644 | Signal Transduction |
| 1342 | | oncogene family (Rab23), mRNA” | | | | |
| 1343 | H3022B12 | ribonuclease P (14 kD) (RPP14), | Homo sapiens ribonuclease P (14 kD) | BG064641 | Mm.41801 | Energy/Metabolism |
| 1344 | | | (RPP14), mRNA | | | |
| 1345 | H3022D02 | dolichyl-phosphate beta- | Homo sapiens dolichyl-phosphate beta- | BG064654 | Mm.27890 | Energy/Metabolism |
| 1346 | | glucosyltransferase | glucosyltransferase mRNA, complete | | | |
| | | | cds | | | |
| 1347 | H3022D03 | galactokinase gene | Mus musculus galactokinase gene, | BG064655 | Mm.2820 | Energy/Metabolism |
| 1348 | | | complete cds | | | |
| 1349 | H3022D09 | beta-glucuronidase gene | Mouse beta-glucuronidase gene, | BG077995 | Mm.3317 | Energy/Metabolism |
| 1350 | | | complete cds | | | |
| 1351 | H3022E01 | GLUT4 vesicle protein, partial cds | Mus musculus GLUT4 vesicle protein | BG064664 | Mm.29010 | Energy/Metabolism |
| 1352 | | | mRNA, partial cds | | | |
| 1353 | H3022E09 | a disintegrin-like and metalloprotease | Homo sapiens a disintegrin-like and | BG078006 | Mm.102791 | Energy/Metabolism |
| 1354 | | (reprolysin type) with thrombospondin | metalloprotease (reprolysin type) with | | | |
| | | type 1 motif, 4 (ADAMTS4), | thrombospondin type 1 motif, 4 | | | |
| | | | (ADAMTS4), mRNA | | | |
| 1355 | H3022F06 | malic enzyme, supernatant (Mod1), | Mus musculus malic enzyme, | BG064680 | Mm.29998 | Energy/Metabolism |
| 1356 | | | supematant (Mod1), mRNA | | | |
| 1357 | H3022G02 | 26S protease ATPase (mss1), partial | Mus musculus 26S protease ATPase | BG078023 | Mm.2462 | Energy/Metabolism |
| 1358 | | cds | (mss1) mRNA, partial cds | | | |
| 1359 | H3022G03 | 26S protease ATPase (mss1), partial | Mus musculus 26S protease ATPase | BG078024 | Mm.2462 | Energy/Metabolism |
| 1360 | | cds | (mss1) mRNA, partial cds | | | |
| 1361 | H3022H03 | serine/threonine kinase 17b (apoptosis- | Homo sapiens serine/threonine kinase | BG078034 | Mm.25559 | Apoptosis |
| 1362 | | inducing) (STK17B), | 17b (apoptosis-inducing) (STK17B), | | | |
| | | | mRNA | | | |
| 1363 | H3022H06 | “Mouse serine/threonine phosphatase- | | BG064691 | Mm.849 | Signal Transduction |
| 1364 | | 2C (PP2C) mRNA, complete cds” | | | | |
| 1365 | H3023A10 | folylpolyglutamate synthetase precursor | Mus musculus folylpolyglutamate | BG064717 | Mm.3830 | Energy/Metabolism |
| 1366 | | (Fpgs) | synthetase precursor (Fpgs) mRNA, | | | |
| | | | complete cds | | | |
| 1367 | H3023B01 | | | | | Heat Shock/Stress |
| 1368 | | | | | | |
| 1369 | H3023B11 | “Mouse mRNA for HSP60 protein | | BG064728 | Mm.1777 | Heat Shock/Stress |
| 1370 | | (clones 3T3-7, -9, and -M1)” | | | | |
| 1371 | H3023B12 | Mouse cDNA for heat shock protein 65 | | BG064729 | Mm.1777 | Heat Shock/Stress |
| 1372 | | | | | | |
| 1373 | H3023C05 | Homo sapiens nuclear receptor binding | | BG064733 | Mm.22029 | |
| 1374 | | protein (NRBP), mRNA | | | | |
| 1375 | H3023C07 | peroxiredoxin 5 (Prdx5), | Mus musculus peroxiredoxin 5 (Prdx5), | BG064735 | Mm.6587 | Energy/Metabolism |
| 1376 | | | mRNA | | | |
| 1377 | H3023C08 | ribonucleotide reductase M1 (Rrm1), | Mus musculus ribonucleotide reductase | BG064736 | Mm.656 | Energy/Metabolism |
| 1378 | | | M1 (Rrm1), mRNA | | | |
| 1379 | H3023C09 | Mm.29735 | | | Mm.29735 | Energy/Metabolism |
| 1380 | | | | | | |
| 1381 | H3023D06 | Mus musculus phosphoglycerate kinase | | BG064745 | Mm.188 | Signal Transduction |
| 1382 | | (Pgk1-ps1) processed pseudogene | | | | |
| 1383 | H3023D08 | glutamate pyruvate transaminase (GPT) | Human glutamate pyruvate | BG064747 | Mm.30130 | Energy/Metabolism |
| 1384 | | gene | transaminase (GPT) gene, complete cds | | | |
| 1385 | H3023D09 | partial xylosyltransferase II (XT-II | Mus musculus partial mRNA for | BG078081 | Mm.100638 | Energy/Metabolism |
| 1386 | | gene) | xylosyltransferase II (XT-II gene) | | | |
| 1387 | H3023E11 | SDHD gene small subunit of | Homo sapiens SDHD gene for small | BG078095 | Mm.10406 | Energy/Metabolism |
| 1388 | | cytochrome b of succinate | subunit of cytochrome b of succinate | | | |
| | | dehydrogenase | dehydrogenase, complete cds | | | |
| 1389 | H3023F02 | “Mus musculus phosphatidylinositol-4- | | BG064765 | Mm.3191 | Signal Transduction |
| 1390 | | phosphate 5-kinase, type 1 beta | | | | |
| | | (Pip5k1b), mRNA” | | | | |
| 1391 | H3023F07 | “Mus musculus Ccte gene for | | BG064769 | Mm.1813 | Heat Shock/Stress |
| 1392 | | chaperonin containing TCP-1 epsilon | | | | |
| | | subunit, complete cds” | | | | |
| 1393 | H3023F08 | “Mus musculus Ccte gene for | | BG064770 | Mm.1813 | Heat Shock/Stress |
| 1394 | | chaperonin containing TCP-1 epsilon | | | | |
| | | subunit, complete cds” | | | | |
| 1395 | H3023F09 | glucosamine-6-phosphate deaminase | Mus musculus glucosamine-6- | BG064771 | Mm.22374 | Energy/Metabolism |
| 1396 | | (Gnpda) | phosphate deaminase (Gnpda) mRNA, | | | |
| | | | complete cds | | | |
| 1397 | H3023F10 | “Mus musculus heat shock protein, 86 | | BG064772 | Mm.1843 | Heat Shock/Stress |
| 1398 | | kDa 1 (Hsp86-1), mRNA” | | | | |
| 1399 | H3023F12 | “Mus musculus heat shock protein, 86 | | BG064774 | Mm.1843 | Heat Shock/Stress |
| 1400 | | kDa 1 (Hsp86-1), mRNA” | | | | |
| 1401 | H3023G01 | “Mus musculus heat shock protein, 86 | | BG064775 | Mm.1843 | Heat Shock/Stress |
| 1402 | | kDa 1 (Hsp86-1), mRNA” | | | | |
| 1403 | H3023G05 | phosphoribosyl pyrophosphate | Mus musculus phosphoribosyl | BG064779 | Mm.25198 | Energy/Metabolism |
| | | synthetase 1 (Prps1), | pyrophosphate synthetase 1 (Prps1), | | | |
| | | | mRNA | | | |
| 1404 | H3023H09 | ferritin L-subunit gene exons 1-4 | Mus musculus ferritin L-subunit gene | BG064794 | Mm.7500 | Energy/Metabolism |
| 1405 | | | exons 1-4, complete cds | | | |
| 1406 | H3023H10 | ferritin L-subunit gene exons 1-4 | Mus musculus ferritin L-subunit gene | BG064795 | Mm.7500 | Energy/Metabolism |
| 1407 | | | exons 1-4, complete cds | | | |
| 1408 | H3023H11 | ferritin L-subunit gene exons 1-4 | Mus musculus ferritin L-subunit gene | BG064796 | Mm.7500 | Energy/Metabolism |
| 1409 | | | exons 1-4, complete cds | | | |
| 1410 | H3023H12 | lactate dehydrogenase 1, A chain | Mus musculus lactate dehydrogenase 1, | BG064797 | Mm.26504 | Energy/Metabolism |
| 1411 | | (Ldh1), | A chain (Ldh1), mRNA | | | |
| 1412 | H3024A02 | polymerase, gamma (Polg), | Mus musculus polymerase, gamma | BG064799 | Mm.3616 | DNA Replication |
| 1413 | | | (Polg), mRNA | | | |
| 1414 | H3024A06 | alcohol dehydrogenase 5 (Adh5), | Mus musculus alcohol dehydrogenase 5 | BG064803 | Mm.3874 | Energy/Metabolism |
| 1415 | | | (Adh5), mRNA | | | |
| 1416 | H3024A11 | DNA M2 subunit of ribonucleotide | Mouse DNA for M2 subunit of mouse | BG078138 | Mm.99 | Energy/Metabolism |
| 1417 | | reductase (EC 1.17.4.1) | ribonucleotide reductase (EC 1.17.4.1) | | | |
| 1418 | H3024B03 | “Mus musculus chaperonin subunit 3 | | BG064811 | Mm.3576 | Heat Shock/Stress |
| 1419 | | (gamma) (Cct3), mRNA” | | | | |
| 1420 | H3024B04 | “Mus musculus chaperonin subunit 3 | | BG064812 | Mm.3576 | Heat Shock/Stress |
| 1421 | | (gamma) (Cct3), mRNA” | | | | |
| 1422 | H3024B05 | “Mus musculus chaperonin subunit 3 | | BG064813 | Mm.3576 | Heat Shock/Stress |
| 1423 | | (gamma) (Cct3), mRNA” | | | | |
| 1424 | H3024B06 | “Mus musculus chaperonin subunit 3 | | BG064814 | Mm.3576 | Heat Shock/Stress |
| 1425 | | (gamma) (Cct3), mRNA” | | | | |
| 1426 | H3024B12 | | | | | Heat Shock/Stress |
| 1427 | | | | | | |
| 1428 | H3024C02 | “Homo sapiens oxidative-stress | | BG078151 | Mm.52786 | Heat Shock/Stress |
| 1429 | | responsive 1 (OSR1), mRNA” | | | | |
| 1430 | H3024C04 | phosphoglycerate mutase 1 (Pgam1) | Mus musculus phosphoglycerate | BG064823 | Mm.16783 | Energy/Metabolism |
| 1431 | | | mutase 1 (Pgam1) mRNA, complete cds | | | |
| 1432 | H3024C07 | HEXA gene, exons 2-14 | M. musculus HEXA gene, exons 2-14 | BG064825 | Mm.2284 | Energy/Metabolism |
| 1433 | | | | | | |
| 1434 | H3024C11 | “Mus musculus heat shock protein, 86 kDa | | BG064829 | Mm.1843 | Heat Shock/Stress |
| 1435 | | 1 (Hsp86-1), mRNA” | | | | |
| 1436 | H3024E08 | direct IAP binding protein with low PI | Mus musculus direct IAP binding | BG064850 | Mm.46716 | Apoptosis |
| 1437 | | | protein with low PI mRNA, complete | | | |
| | | | cds | | | |
| 1438 | H3024F05 | Mus musculus putative CCAAT binding | | BG064857 | Mm.24169 | Transcription/Chromatin |
| 1439 | | factor 1 (mCBF) mRNA, alternatively | | | | |
| | | spliced transcript mCBF1, complete cds | | | | |
| 1440 | H3024F06 | serine hydroxymethyl transferase 1 | Mus musculus serine hydroxymethyl | BG078187 | Mm.45993 | Energy/Metabolism |
| 1441 | | (soluble) (Shmt1), | transferase 1 (soluble) (Shmt1), mRNA | | | |
| 1442 | H3024F07 | fumarate hydratase (FH), | Homo sapiens fumarate hydratase (FH), | BG064859 | Mm.41502 | Energy/Metabolism |
| 1443 | | | mRNA | | | |
| 1444 | H3024G02 | phosphoribosyl pyrophosphate | Mus musculus phosphoribosyl | BG064866 | Mm.25198 | Energy/Metabolism |
| 1445 | | synthetase 1 (Prps1), | pyrophosphate synthetase 1 (Prps1), | | | |
| | | | mRNA | | | |
| 1446 | H3024G03 | K+ channel, sequence | Rattus norvegicus K+ channel mRNA, | BG078196 | Mm.40482 | Energy/Metabolism |
| 1447 | | | sequence | | | |
| 1448 | H3024G07 | Murine L-myc gene | | BG064871 | Mm.1055 | Signal Transduction |
| 1449 | | | | | | |
| 1450 | H3024H02 | “Mus musculus p53 binding protein 1 | | BG078205 | Mm.25231 | Signal Transduction |
| 1451 | | mRNA, partial cds” | | | | |
| 1452 | H3024H12 | “Mus musculus breast heat shock 73 | | BG064886 | Mm.2944 | Heat Shock/Stress |
| 1453 | | protein (hsc73) mRNA, complete cds” | | | | |
| 1454 | H3025A01 | “Mus musculus interferon alpha | | BG078215 | Mm.21761 | Heat Shock/Stress |
| 1455 | | responsive protein (15 kDa) (Ifrg15), | | | | |
| | | mRNA” | | | | |
| 1456 | H3025C05 | malate dehydrogenase, soluble (Mor2), | Mus musculus malate dehydrogenase, | BG064914 | Mm.3156 | Energy/Metabolism |
| 1457 | | | soluble (Mor2), mRNA | | | |
| 1458 | H3025D10 | Aga = aspartylglucosaminidase [mice, | Aga = aspartylglucosaminidase [mice, | BG064929 | Mm.41591 | Energy/Metabolism |
| 1459 | | liver, brain, Partial, 1191 nt] | liver, brain, mRNA Partial, 1191 nt] | | | |
| 1460 | H3025E07 | ADP-ribosylarginine hydrolase | Mus musculus ADP-ribosylarginine | BG064935 | Mm.20047 | Energy/Metabolism |
| 1461 | | | hydrolase mRNA, complete cds | | | |
| 1462 | H3025F10 | succinate dehydrogenase Ip subunit, | Mus musculus succinate dehydrogenase | BG064949 | Mm.29141 | Energy/Metabolism |
| 1463 | | partial cds | Ip subunit mRNA, partial cds | | | |
| 14641465 | H3026B03 | HSPC145 protein (HSPC145), | Homo sapiens HSPC145 protein | | Mm.29904 | |
| | | | (HSPC145), mRNA | | | |
| 1466 | H3026B04 | phosphoribosyl pyrophosphate | Homo sapiens phosphoribosyl | BG064988 | Mm.27743 | Energy/Metabolism |
| 1467 | | amidotransferase (PPAT), | pyrophosphate amidotransferase | | | |
| | | | (PPAT), mRNA | | | |
| 1468 | H3026B06 | Mm.100588 | | | Mm.100588 | Energy/Metabolism |
| 1469 | | | | | | |
| 1470 | H3026B07 | ADP-ribosylation factor 1 (Arf1), | Mus musculus ADP-ribosylation factor | BG078294 | Mm.6836 | Energy/Metabolism |
| 1471 | | | 1 (Arf1), mRNA | | | |
| 1472 | H3026B11 | ATPase, Cu++ transporting, beta | Mus musculus ATPase, Cu++ | BG078297 | Mm.102506 | Energy/Metabolism |
| 1473 | | polypeptide (Atp7b), | transporting, beta polypeptide (Atp7b), | | | |
| | | | mRNA | | | |
| 1474 | H3026D06 | tyrosine 3-monooxygenase/tryptophan | Mus musculus tyrosine 3- | BG065012 | Mm.3308 | Energy/Metabolism |
| 1475 | | 5-monooxygenase activation protein, eta | monooxygenase/tryptophan 5- | | | |
| | | polypeptide (Ywhah), | monooxygenase activation protein, eta | | | |
| | | | polypeptide (Ywhah), mRNA | | | |
| 1476 | H3026D10 | “Mus musculus heat shock protein, | | BG065015 | Mm.27897 | Heat Shock/Stress |
| 1477 | | DNAJ-like 2 (Hsj2), mRNA” | | | | |
| 1478 | H3026E07 | cDNA FLJ12225 fis, clone | Homo sapiens cDNA FLJ12225 fis, | BG078316 | Mm.12983 | Energy/Metabolism |
| 1479 | | MAMMA1001139, weakly similar to | clone MAMMA101139, weakly | | | |
| | | SRE-2 PROTEIN | similar to SRE-2 PROTEIN | | | |
| 1480 | H3026F02 | M. musculus GSHPx gene | M. musculus GSHPx gene | BG065030 | Mm.1090 | Energy/Metabolism |
| 1481 | | | | | | |
| 1482 | H3026F05 | acetyl-Coenzyme A dehydrogenase, | Mus musculus acetyl-Coenzyme A | BG065033 | Mm.18759 | Energy/Metabolism |
| 1483 | | short chain (Acads), | dehydrogenase, short chain (Acads), | | | |
| | | | mRNA | | | |
| 1484 | H3026F06 | H. sapiens phosphoenolpyruvate | H. sapiens mRNA for | BG078326 | Mm.29856 | Energy/Metabolism |
| 1485 | | carboxykinase | phosphoenolpyruvate carboxykinase | | | |
| 1486 | H3026F07 | “Mus musculus Ccth gene for | | BG065035 | Mm.914 | Heat Shock/Stress |
| 1487 | | chaperonin containing TCP-1 eta | | | | |
| | | subunit, complete cds” | | | | |
| 1488 | H3026F08 | “Mus musculus Ccth gene for | | BG065036 | Mm.914 | Heat Shock/Stress |
| 1489 | | chaperonin containing TCP-1 eta | | | | |
| | | subunit, complete cds” | | | | |
| 1490 | H3026G10 | mannose phosphate isomerase (MPI), | Homo sapiens mannose phosphate | BG078342 | Mm.34830 | Energy/Metabolism |
| 1491 | | | isomerase (MPI), mRNA | | | |
| 1492 | H3026H09 | methionine adenosyltransferase alpha | Homo sapiens methionine | BG065061 | Mm.29815 | Energy/Metabolism |
| 1493 | | subunit gene fragment | adenosyltransferase alpha subunit gene | | | |
| | | | fragment | | | |
| 1494 | H3026H11 | puromycin-sensitive aminopeptidase | Mus musculus puromycin-sensitive | BG065063 | Mm.29824 | Energy/Metabolism |
| 1495 | | (Psa), | aminopeptidase (Psa), mRNA | | | |
| 1496 | H3027A10 | ATPase-like vacuolar proton channel | Mus musculus ATPase-like vacuolar | BG065073 | Mm.30155 | Energy/Metabolism |
| 1497 | | (Atpl) | proton channel (Atpl), mRNA | | | |
| 1498 | H3027B02 | “Homo sapiens SH3-domain binding | | BG078369 | Mm.62046 | Signal Transduction |
| 1499 | | protein 4 (SH3BP4), mRNA” | | | | |
| 1500 | H3027C06 | transient receptor potential-related | Mus musculus transient receptor | BG065092 | Mm.33819 | Energy/Metabolism |
| 1501 | | protein (ChaK), | potential-related protein (ChaK), mRNA | | | |
| 1502 | H3027E05 | uridine phosphorylase (Upp), | Mus musculus uridine phosphorylase | BG065114 | Mm.4610 | Energy/Metabolism |
| 1503 | | | (Upp), mRNA | | | |
| 1504 | H3027E07 | alpha-enolase (2-phospho-D-glycerate | Mouse mRNA for alpha-enolase (2- | BG078408 | Mm.90587 | Energy/Metabolism |
| 1505 | | hydrolase) (EC 4.2.1.11) | phospho-D-glycerate hydrolase) (EC | | | |
| | | | 4.2.1.11) | | | |
| 1506 | H3027E08 | alpha-enolase (2-phospho-D-glycerate | Mouse mRNA for alpha-enolase (2- | BG078409 | Mm.90587 | Energy/Metabolism |
| 1507 | | hydrolase) (EC 4.2.1.11) | phospho-D-glycerate hydrolase) (EC | | | |
| | | | 4.2.1.11) | | | |
| 1508 | H3027E09 | alpha-enolase (2-phospho-D-glycerate | Mouse mRNA for alpha-enolase (2- | BG078410 | Mm.90587 | Energy/Metabolism |
| 1509 | | hydrolase) (EC 4.2.1.11) | phospho-D-glycerate hydrolase) (EC | | | |
| | | | 4.2.1.11) | | | |
| 1510 | H3027F02 | aspartyl-tRNA synthetase (DARS), | Homo sapiens aspartyl-tRNA synthetase | BG078414 | Mm.28693 | Energy/Metabolism |
| 1511 | | | (DARS), mRNA | | | |
| 1512 | H3027F07 | “Murine MAP kinase kinase 6c mRNA, | | BG065128 | Mm.14487 | Signal Transduction |
| 1513 | | complete cds” | | | | |
| 1514 | H3027F12 | “Mus musculus Cctd gene for | | BG078424 | Mm.6821 | Heat Shock/Stress |
| 1515 | | chaperonin containing TCP-1 delta | | | | |
| | | subunit, complete cds” | | | | |
| 1516 | H3027H04 | “Homo sapiens heat shock protein 75 | | BG078439 | Mm.38470 | Heat Shock/Stress |
| 1517 | | (TRAP1), mRNA” | | | | |
| 1518 | H3028A03 | peptidylprolyl isomerase A (Ppia), | Mus musculus peptidylprolyl isomerase | BG078450 | Mm.5246 | Energy/Metabolism |
| 1519 | | | A (Ppia), mRNA | | | |
| 1520 | H3028A04 | peptidylprolyl isomerase A (Ppia), | Mus musculus peptidylprolyl isomerase | BG078451 | Mm.5246 | Energy/Metabolism |
| 1521 | | | A (Ppia), mRNA | | | |
| 1522 | H3028A09 | BTB and CNC homology 2 (Bach2), | Mus musculus BTB and CNC homology | BG065166 | Mm.21908 | Energy/Metabolism |
| 1523 | | | 2 (Bach2), mRNA | | | |
| 1524 | H3028B03 | adenine nucleotide translocase-2 (Ant2) | Mus musculus adenine nucleotide | | Mm.658 | Energy/Metabolism |
| 1525 | | | translocase-2 (Ant2) mRNA, complete | | | |
| | | | cds | | | |
| 1526 | H3028C09 | “Mus musculus adenosine kinase (Adk), | | BG065190 | Mm.19352 | Signal Transduction |
| 1527 | | mRNA” | | | | |
| 1528 | H3028E01 | death associated protein 3 (DAP-3 gene) | Mus musculus mRNA for death | BG078504 | Mm.29028 | Apoptosis |
| 1529 | | | associated protein 3 (DAP-3 gene) | | | |
| 1530 | H3028E04 | “Mus musculus protein phosphatase 2 | | BG078507 | Mm.1034 | Signal Transduction |
| 1531 | | (formerly 2A), regulatory subunit A (PR | | | | |
| | | 65), alpha isoform (Ppp2r1a), mRNA” | | | | |
| 1532 | H3028F04 | “Mus musculus cathepsin L (Ctsl), | | BG078497 | Mm.930 | Signal Transduction |
| 1533 | | mRNA” | | | | |
| 1534 | H3028F05 | kidney ornithine decarboxylase, clone | Mouse kidney ornithine decarboxylase | BG065221 | Mm.15259 | Energy/Metabolism |
| 1535 | | pODC16, 3 end | mRNA, clone pODC16, 3 end | | | |
| 1536 | H3028F06 | “Mus musculus RAB17, member RAS | | BG078499 | Mm.46396 | Signal Transduction |
| 1537 | | oncogene family (Rab17), mRNA” | | | | |
| 1538 | H3028H11 | “Mus musculus cathepsin H (Ctsh), | | BG065250 | Mm.2277 | Signal Transduction |
| 1539 | | mRNA” | | | | |
| 1540 | H3029A03 | peroxisomal trans 2-enoyl CoA | Mus musculus peroxisomal trans 2- | BG065254 | Mm.29988 | Energy/Metabolism |
| 1541 | | reductase | enoyl CoA reductase mRNA, complete | | | |
| | | | cds | | | |
| 1542 | H3029A05 | cellular apoptosis susceptibility protein | Mus musculus cellular apoptosis | BG065256 | Mm.22417 | Apoptosis |
| 1543 | | | susceptibility protein mRNA, complete | | | |
| | | | cds | | | |
| 1544 | H3029B01 | natural resistance associated | Mus musculus natural resistance | BG065264 | Mm.1304 | Energy/Metabolism |
| 1545 | | macrophage protein-2 (Nramp2), C- | associated macrophage protein-2 | | | |
| | | terminal exon alternative splice variant | (Nramp2) mRNA, C-terminal exon | | | |
| | | | alternative splice variant, complete cds | | | |
| 1546 | H3029B02 | “Mus musculus chaperonin subunit 3 | | BG078552 | Mm.27804 | Heat Shock/Stress |
| 1547 | | (gamma) (Cct3), mRNA” | | | | |
| 1548 | H3029C05 | NADH dehydrogenase (ubiquinone) 1, | Homo sapiens NADH dehydrogenase | BG078565 | Mm.1893 | Energy/Metabolism |
| 1549 | | subcomplex unknown, 2 (14.5 kD, | (ubiquinone) 1, subcomplex unknown, 2 | | | |
| | | B14.5b) (NDUFC2), | (14.5 kD, B14.5b) (NDUFC2), mRNA | | | |
| 1550 | H3029C06 | | | | | Heat Shock/Stress |
| 1551 | | | | | | |
| 1552 | H3029E04 | “Mus musculus Son of sevenless | | BG065298 | Mm.6357 | Signal Transduction |
| 1553 | | homolog 1, (Drosophila)(Sos1), | | | | |
| | | mRNA” | | | | |
| 1554 | H3029G12 | nuclear mitotic apparatus protein 1 | Homo sapiens nuclear mitotic apparatus | | Mm.102520 | |
| | | (NUMA1), | protein 1 (NUMA1), mRNA | | | |
| 1555 | H3030A03 | Mouse cDNA for heat shock protein 65 | | BG078626 | Mm.1777 | Heat Shock/Stress |
| 1556 | | | | | | |
| 1557 | H3030B07 | | | | Mm.1776 | Heat Shock/Stress |
| 1558 | | | | | | |
| 1559 | H3030C05 | “Mus musculus activin receptor IIB | | BG065366 | Mm.8940 | Signal Transduction |
| 1560 | | (Acvr2b), mRNA” | | | | |
| 1561 | H3030C06 | “Mus musculus nucleoside diphosphate | | BG078650 | Mm.1260 | Signal Transduction |
| 1562 | | kinase A long form mRNA, complete | | | | |
| | | cds” | | | | |
| 1563 | H3030C11 | H3030C11 | | | | Energy/Metabolism |
| 1564 | | | | | | |
| 1565 | H3030D10 | pyruvate kinase M | Mus musculus mRNA for pyruvate | BG078663 | Mm.2635 | Energy/Metabolism |
| 1566 | | | kinase M, complete cds | | | |
| 1567 | H3030D11 | pyruvate kinase M | Mus musculus mRNA for pyruvate | BG078664 | Mm.2635 | Energy/Metabolism |
| 1568 | | | kinase M, complete cds | | | |
| 1569 | H3030E04 | Mm.26022 | | | Mm.26022 | Energy/Metabolism |
| 1570 | | | | | | |
| 1571 | H3030E05 | glycine decarboxylase (P-protein) | Human glycine decarboxylase (P- | BG078669 | Mm.27953 | Energy/Metabolism |
| 1572 | | | protein) mRNA | | | |
| 1573 | H3030E06 | glycine decarboxylase (P-protein) | Human glycine decarboxylase (P- | BG078670 | Mm.27953 | Energy/Metabolism |
| 1574 | | | protein) mRNA | | | |
| 1575 | H3030E10 | “Mus musculus cathepsin B (Ctsb), | | BG078674 | Mm.22753 | Signal Transduction |
| 1576 | | mRNA” | | | | |
| 1577 | H3030F09 | Homo sapiens protein phosphatase 3 | | AW537455 | Mm.142697 | Matrix/Structural |
| 1578 | | (formerly 2B), catalytic subunit, beta | | | | Proteins |
| | | isoform (calcineurin A beta) (PPP3CB), | | | | |
| | | mRNA | | | | |
| 1579 | H3030G01 | Cochlear (clone 20F5) | M. musculus partial cochlear mRNA | BG078685 | Mm.43671 | Energy/Metabolism |
| 1580 | | | (clone 20F5) | | | |
| 1581 | H3030G08 | ATP synthase alpha subunit | Mouse ATP synthase alpha subunit, | BG078689 | Mm.4069 | Energy/Metabolism |
| 1582 | | | complete cds | | | |
| 1583 | H3030G09 | “Mus musculus Ca2+-independent | | BG065409 | Mm.117103 | Signal Transduction |
| 1584 | | phospholipase A2 long form mRNA, | | | | |
| | | complete cds” | | | | |
| 1585 | H3030H02 | Bckdk | Mus musculus branched chain ketoacid | BG078694 | Mm.8903 | Signal Transduction |
| 1586 | | | dehydrogenase kinase (Bckdk), mRNA | | | |
| 1587 | H3031A11 | “Mus musculus protein kinase C | | BG078710 | Mm.70272 | Signal Transduction |
| 1588 | | substrate 80K-H (Prkcsh), mRNA” | | | | |
| 1589 | H3031B06 | cytosolic aminopeptidase P | Homo sapiens cytosolic | BG078715 | Mm.99776 | Energy/Metabolism |
| 1590 | | | aminopeptidase P mRNA, complete cds | | | |
| 1591 | H3031C05 | PIS1 gene phosphatidylinositol synthase | Rattus norvegicus PIS1 gene for | BG065447 | Mm.28219 | Energy/Metabolism |
| 1592 | | | phosphatidylinositol synthase, complete | | | |
| | | | cds | | | |
| 1593 | H3031C09 | “Mus musculus putative intracellular | | BG078729 | Mm.27063 | Signal Transduction |
| 1594 | | signaling protein (Trip6) mRNA, | | | | |
| | | complete cds” | | | | |
| 1595 | H3031C12 | Mus musculus N-myc downstream | | BG078732 | Mm.4063 | Transcription/Chromatin |
| 1596 | | regulated 1 (Ndr1), mRNA | | | | |
| 1597 | H3031D03 | aldolase 1, A isom (Aldo1), | Mus musculus aldolase 1, A isoform | BG065457 | Mm.16763 | Energy/Metabolism |
| 1598 | | | (Aldo1), mRNA | | | |
| 1599 | H3031E10 | S-adenosylhomocysteine hydrolase | Mus musculus S-adenosylhomocysteine | BG065475 | Mm.2573 | Energy/Metabolism |
| 1600 | | (Ahcy), | hydrolase (Ahcy), mRNA | | | |
| 1601 | H3031E11 | glyceraldehyde-3-phosphate | Mus musculus glyceraldehyde-3- | BG065476 | Mm.5289 | Energy/Metabolism |
| 1602 | | dehydrogenase (Gapd), | phosphate dehydrogenase (Gapd), | | | |
| | | | mRNA | | | |
| 1603 | H3031E12 | fatty acid desaturase 1 (FADS1), | Homo sapiens fatty acid desaturase 1 | BG078755 | Mm.30158 | Energy/Metabolism |
| 1604 | | | (FADS1), mRNA | | | |
| 1605 | H3031F01 | ubiquinol-cytochrome c reductase core | Homo sapiens ubiquinol-cytochrome c | BG065478 | Mm.972 | Energy/Metabolism |
| 1606 | | protein I (UQCRC1), | reductase core porotein I (UQCRC1), | | | |
| | | | mRNA | | | |
| 1607 | H3031F08 | “Mus musculus heat shock protein 40 | | BG065483 | Mm.2982 | Heat Shock/Stress |
| 1608 | | (HSPF1), mRNA” | | | | |
| 1609 | H3031F12 | M. musculus aspartate aminotransferase | M. musculus aspartate aminotransferase | BG078765 | Mm.149089 | Energy/Metabolism |
| 1610 | | gene exon 10 and 3-flank | gene exon 10 and 3-flank | | | |
| 1611 | H3031G06 | “Mus musculus heat shock protein, 110 kDa | | BG065493 | Mm.1032 | Heat Shock/Stress |
| 1612 | | (Hsp110), mRNA” | | | | |
| 1613 | H3031G08 | Mm.93266 | | | Mm.93266 | Energy/Metabolism |
| 1614 | | | | | | |
| 1615 | H3031G11 | ATPase, H+ transporting, lysosomal | Homo sapiens ATPase, H+ transporting, | BG078776 | Mm.22602 | Energy/Metabolism |
| 1616 | | (vacuolar proton pump) 9 kD (ATP6H), | lysosomal (vacuolar proton pump) 9 kD | | | |
| | | | (ATP6H), mRNA | | | |
| 1617 | H3031H09 | 5-3 exoribonuclease 2 (Xrn2), | Mus musculus 5-3 exoribonuclease 2 | BG065507 | Mm.3065 | Energy/Metabolism |
| 1618 | | | (Xrn2), mRNA | | | |
| 1619 | H3032A01 | hypothetical protein PRO1197 | Homo sapiens hypothetical protein | BG065511 | Mm.24565 | Energy/Metabolism |
| 1620 | | (PRO1197), | PRO1197 (PRO1197), mRNA | | | |
| 1621 | H3032A08 | “Mus musculus heat shock 70 kD protein | | BG078795 | Mm.918 | Heat Shock/Stress |
| 1622 | | 5 (glucose-regulated protein, 78 kD) | | | | |
| | | (Hspa5), mRNA” | | | | |
| 1623 | H3032A09 | peroxisomal integral membrane protein | Mus musculus mRNA for peroxisomal | | Mm.306 | Matrix/Structural |
| 1624 | | PMP34 | integral membrane protein PMP34 | | | Proteins |
| 1625 | H3032A12 | glucose-6-phosphate dehydrogenase X- | Mus musculus glucose-6-phosphate | BG078799 | Mm.27210 | Energy/Metabolism |
| 1626 | | linked (G6pdx), | dehydrogenase X-linked (G6pdx), | | | |
| | | | mRNA | | | |
| 1627 | H3032C01 | cytochrome c gene (MC1) | Mouse cytochrome c gene (MC1) | BG078810 | Mm.35389 | Energy/Metabolism |
| 1628 | | | | | | |
| 1629 | H3032C10 | 3-hydroxy-3-methylglutaryl-Coenzyme | Homo sapiens 3-hydroxy-3- | BG078816 | Mm.2226 | Energy/Metabolism |
| 1630 | | A reductase (HMGCR), | methylglutaryl-Coenzyme A reductase | | | |
| | | | (HMGCR), mRNA | | | |
| 1631 | H3032H02 | phosphatidylcholine transfer protein-like | Mus musculus phosphatidylcholine | BG078855 | Mm.28896 | Energy/Metabolism |
| 1632 | | (Pctpl), | transfer protein-like (Pctpl), mRNA | | | |
| 1633 | H3033A10 | R. norvegicus gene 6-phosphofructo-2- | R. norvegicus gene for 6-phosphofructo- | BG078872 | | Energy/Metabolism |
| 1634 | | kinase/fructose-2,6-biphosphatase (EC | 2-kinase/fructose-2,6-biphosphatase (EC | | | |
| | | 2.7.1.105/EC 3.1.3.46) | 2.7.1.105/EC 3.1.3.46) | | | |
| 1635 | H3033B08 | cytochrome c oxidase, subunit IV | Mus musculus cytochrome c oxidase, | BG078879 | Mm.2136 | Energy/Metabolism |
| 1636 | | (Cox4), | subunit IV (Cox4), mRNA | | | |
| 1637 | H3033B11 | serine protease inhibitor 3 (Spi3), | Mus musculus serine protease inhibitor | BG078882 | Mm.147649 | Energy/Metabolism |
| 1638 | | | 3 (Spi3), mRNA | | | |
| 1639 | H3033C02 | “Mus musculus serine/threonine kinase | | BG078885 | Mm.3794 | Signal Transduction |
| 1640 | | (sak-a) mRNA, complete cds” | | | | |
| 1641 | H3033E10 | ectonucleotide | Mus musculus ectonucleotide | BG065640 | Mm.27254 | Energy/Metabolism |
| 1642 | | pyrophosphatase/phosphodiesterase 1 | pyrophosphatase/phosphodiesterase 1 | | | |
| | | (Enpp1), | (Enpp1), mRNA | | | |
| 1643 | H3034B11 | ATP-binding cassette, sub-family B | | | Mm.143731 | Energy/Metabolism |
| 1644 | | (MDR/TAP), member 12 ABC-me | | | | |
| 1645 | H3035A01 | tumor necrosis factor, alpha-induced | Mus musculus tumor necrosis factor, | BG065761 | Mm.4348 | Apoptosis |
| 1646 | | protein 2 (Tnfaip2), | alpha-induced protein 2 (Tnfaip2), | | | |
| | | | mRNA | | | |
| 1647 | H3035B03 | Mm.32746 | | | Mm.32746 | Energy/Metabolism |
| 1648 | | | | | | |
| 1649 | H3035D08 | Mouse gene for beta-2-adrenergic | | BG079067 | Mm.5598 | Signal Transduction |
| 1650 | | receptor | | | | |
| 1651 | H3035F02 | “Mus musculus RNA-binding protein | | BG065817 | Mm.2411 | Signal Transduction |
| 1652 | | isoform G3BP-2a (G3BP2) mRNA, | | | | |
| | | complete cds” | | | | |
| 1653 | H3036B11 | “Mus musculus Rho guanine nucleotide | | BG079136 | Mm.3181 | Signal Transduction |
| 1654 | | exchange factor (GEF) 1 (Arhgef1), | | | | |
| | | mRNA” | | | | |
| 1655 | H3036H01 | “Mus musculus lysophosphatidic acid | | BG079186 | Mm.4772 | Signal Transduction |
| 1656 | | receptor (vzg-1) mRNA, complete cds” | | | | |
| 1657 | H3037B01 | kinesin-like 6 (mitotic centromere- | Homo sapiens kinesin-like 6 (mitotic | | Mm.27828 | Cell Cycle |
| 1658 | | associated kinesin) (KNSL6), | centromere-associated kinesin) | | | |
| | | | (KNSL6), mRNA | | | |
| 1659 | H3037F06 | serine protease inhibitor, Kunitz type 1 | Mus musculus serine protease inhibitor, | BG079254 | Mm.104955 | Energy/Metabolism |
| 1660 | | (Spint1), | Kunitz type 1 (Spint1), mRNA | | | |
| 1661 | H3037G12 | “Mus musculus cAMP-specific | | BG066005 | Mm.154704 | Signal Transduction |
| 1662 | | phosphodiesterase 4A (Pde4a) gene, | | | | |
| | | exons 2 through 8 and PDE4A isoform | | | | |
| | | 1 exon 1” | | | | |
| 1663 | H3038A06 | “Mus musculus interferon alpha | | BG079287 | Mm.21761 | Heat Shock/Stress |
| 1664 | | responsive protein (15 kDa) (Ifrg15), | | | | |
| | | mRNA” | | | | |
| 1665 | H3038C07 | potassium voltage-gated channel, | Homo sapiens potassium voltage-gated | BG079311 | Mm.113278 | Energy/Metabolism |
| 1666 | | delayed-rectifier, subfamily S, member | channel, delayed-rectifier, subfamily S, | | | |
| | | 3 (KCNS3), | member 3 (KCNS3), mRNA | | | |
| 1667 | H3038C09 | phosphoribosyl pyrophosphate | Homo sapiens phosphoribosyl | BG079313 | Mm.27703 | Energy/Metabolism |
| 1668 | | synthetase-associated protein 2 | pyrophosphate synthetase-associated | | | |
| | | (PRPSAP2), | protein 2 (PRPSAP2), mRNA | | | |
| 1669 | H3038E03 | PRKC, apoptosis, WT1, regulator | Homo sapiens PRKC, apoptosis, WT1, | BG079331 | Mm.6617 | Apoptosis |
| 1670 | | (PAWR), | regulator (PAWR), mRNA | | | |
| 1671 | H3038E05 | Mus musculus growth differentiation | | BG079333 | Mm.4213 | Signal Transduction |
| 1672 | | factor 3 (Gdf3), mRNA | | | | |
| 1673 | H3038E10 | methyltransferase COQ3 (COQ3), | Homo sapiens methyltransferase COQ3 | BG066071 | Mm.5662 | Energy/Metabolism |
| 1674 | | | (COQ3), mRNA | | | |
| 1675 | H3039A05 | “Mus musculus regulator of G-protein | | BG079374 | Mm.13264 | Signal Transduction |
| 1676 | | signaling 11 mRNA, partial cds” | | | | |
| 1677 | H3039B09 | “Mus musculus serine/threonine kinase | | BG066121 | Mm.22584 | Signal Transduction |
| 1678 | | receptor associated protein (Strap), | | | | |
| | | mRNA” | | | | |
| 1679 | H3039C11 | “Mus musculus receptor tyrosine kinase | | BG066134 | Mm.2901 | Signal Transduction |
| 1680 | | (Dtk) mRNA, complete cds” | | | | |
| 1681 | H3039D02 | asparaginyl-tRNA synthetase (NARS), | Homo sapiens asparaginyl-tRNA | BG079401 | Mm.29192 | Energy/Metabolism |
| 1682 | | | synthetase (NARS), mRNA | | | |
| 1683 | H3039E07 | isocitrate dehydrogenase 3 (NAD+) beta | Homo sapiens isocitrate dehydrogenase | C78231 | Mm.29590 | Energy/Metabolism |
| 1684 | | (IDH3B), | 3 (NAD+) beta (IDH3B), mRNA | | | |
| 1685 | H3039E08 | “Mus musculus SH3-containing protein | | BG079417 | Mm.4165 | Signal Transduction |
| 1686 | | SH3P2 mRNA, partial cds” | | | | |
| 1687 | H3039F05 | ornithine aminotransferase (Oat), | Mus musculus ornithine | BG079424 | Mm.42187 | Energy/Metabolism |
| 1688 | | | aminotransferase (Oat), mRNA | | | |
| 1689 | H3039G04 | M. musculus seryl-tRNA synthetase | M. musculus seryl-tRNA synthetase | BG079434 | Mm.28688 | Energy/Metabolism |
| 1690 | | (SERS), 5 end | (SERS) mRNA, 5 end | | | |
| 1691 | H3039G12 | 5-3 exoribonuclease 1 (Xrn1), | Mus musculus 5-3 exoribonuclease 1 | BG079441 | Mm.5703 | Energy/Metabolism |
| 1692 | | | (Xrn1), mRNA | | | |
| 1693 | H3039H01 | “Mus musculus calponin 2 (Cnn2), | | BG079442 | Mm.21776 | Signal Transduction |
| 1694 | | mRNA” | | | | |
| 1695 | H3039H05 | Mus musculus putative CCAAT binding | | BG079446 | Mm.24169 | |
| 1696 | | factor 1 (mCBF) mRNA, alternatively | | | | |
| | | spliced transcript mCBF1, complete cds | | | | |
| 1697 | H3040A04 | adenine phosphoribosyltransferase | Mouse adenine | BG079455 | Mm.1786 | Energy/Metabolism |
| 1698 | | (APRT) | phosphoribosyltransferase (APRT), | | | |
| | | | complete cds | | | |
| 1699 | H3040E11 | palmitoyl-protein thioesterase (Ppt), | Mus musculus palmitoyl-protein | | Mm.153740 | |
| 1700 | | | thioesterase (Ppt), mRNA | | | |
| 1701 | H3041A02 | NADH dehydrogenase (ubiquinone) 1 | Homo sapiens NADH dehydrogenase | BG079485 | Mm.28293 | Energy/Metabolism |
| 1702 | | alpha subcomplex, 10 (42 kD) | (ubiquinone) 1 alpha subcomplex, 10 | | | |
| | | (NDUFA10), | (42 kD) (NDUFA10), mRNA | | | |
| 1703 | H3041A04 | lysyl-tRNA synthetase (KARS), | Homo sapiens lysyl-tRNA synthetase | BG066271 | Mm.29949 | Energy/Metabolism |
| 1704 | | | (KARS), mRNA | | | |
| 1705 | H3041B11 | mevalonate pyrophosphate | Rattus norvegicus mevalonate | BG079503 | Mm.28146 | Energy/Metabolism |
| 1706 | | decarboxylase | pyrophosphate decarboxylase mRNA, | | | |
| | | | complete cds | | | |
| 1707 | H3041F09 | glucose transporter (GLUTX1 gene) | Mus musculus mRNA for glucose | BG066327 | Mm.7241 | Energy/Metabolism |
| 1708 | | | transporter (GLUTX1 gene) | | | |
| 1709 | H3041G03 | solute carrier family 15 (H+/peptide | Mus musculus solute carrier family 15 | BG079545 | Mm.63479 | Energy/Metabolism |
| 1710 | | transporter), member 2 (Slc15a2), | (H+/peptide transporter), member 2 | | | |
| | | | (Slc15a2), mRNA | | | |
| 1711 | H3041G08 | protease (prosome, macropain) 26S | Mus musculus protease (prosome, | BG079550 | Mm.665 | Energy/Metabolism |
| 1712 | | subunit, ATPase 5 (Psmc5), | macropain) 26S subunit, ATPase 5 | | | |
| | | | (Psmc5), mRNA | | | |
| 1713 | H3041H03 | major histocompatibility complex | Mus musculus major histocompatibility | BG079557 | Mm.14808 | Energy/Metabolism |
| 1714 | | region NG27, NG28, RPS28, NADH | complex region NG27, NG28, RPS28, | | | |
| | | oxidoreductase, NG29, KIFC1, Fas- | NADH oxidoreductase, NG29, KIFC1, | | | |
| | | binding protein, BING1, tapasin, | Fas-binding protein, BING1, tapasin, | | | |
| | | RalGDS-like, KE2, BING4, beta 1,3- | RalGDS-like, KE2, BING4, beta 1,3- | | | |
| | | galactosyl transfera | galactosyl transfera | | | |
| 1715 | H3042A05 | BCL2-associated athanogene 4 (BAG4), | Homo sapiens BCL2-associated | BG066354 | Mm.27102 | Apoptosis |
| 1716 | | | athanogene 4 (BAG4), mRNA | | | |
| 1717 | H3042C08 | “Mus musculus dual specificity | | BG079592 | Mm.34912 | Signal Transduction |
| 1718 | | phosphatase 10 (Dusp10), mRNA” | | | | |
| 1719 | H3042D02 | brain cDNA, clone MNCb-2243, similar | Mus musculus brain cDNA, clone | BG079597 | Mm.28373 | Apoptosis |
| 1720 | | to Bcl2-associated athanogene 3 (Bag3), | MNCb-2243, similar to Mus musculus | | | |
| | | | Bcl2-associated athanogene 3 (Bag3), | | | |
| | | | mRNA | | | |
| 1721 | H3042F12 | serine protease inhibitor 4 (Spi4), | Mus musculus serine protease inhibitor | BG079624 | Mm.3093 | Energy/Metabolism |
| 1722 | | | 4 (Spi4), mRNA | | | |
| 1723 | H3042G07 | Mouse heat-shock protein hsp84 mRNA | | BG079631 | Mm.2180 | Heat Shock/Stress |
| 1724 | | | | | | |
| 1725 | H3043A03 | “Mus musculus casein kinase II, alpha | | BG066436 | Mm.23692 | Signal Transduction |
| 1726 | | 1, related sequence 4 (Csnk2a1-rs4), | | | | |
| | | mRNA” | | | | |
| 1727 | H3043F09 | Mus musculus GNB3 gene for GTP- | | BG066499 | Mm.22228 | |
| 1728 | | binding protein beta3 subunit, complete | | | | |
| | | cds | | | | |
| 1729 | H3043F12 | ferrochelatase (Fech), | Mus musculus ferrochelatase (Fech), | BG066502 | Mm.1070 | |
| 1730 | | | mRNA | | | |
| 1731 | H3044B01 | “Mus musculus Cctd gene for | | BG079699 | Mm.36431 | Heat Shock/Stress |
| 1732 | | chaperonin containing TCP-1 delta | | | | |
| | | subunit, complete cds” | | | | |
| 1733 | H3044E06 | protease (prosome, macropain) 28 | Mus musculus protease (prosome, | BG066650 | Mm.830 | Energy/Metabolism |
| 1734 | | subunit, alpha (Psme1), | macropain) 28 subunit, alpha (Psme1), | | | |
| | | | mRNA | | | |
| 1735 | H3044G06 | A10, partial cds | Mus musculus A10 mRNA, partial cds | BG066673 | Mm.16898 | Energy/Metabolism |
| 1736 | | | | | | |
| 1737 | H3045B02 | cytosolic aminopeptidase P | Homo sapiens cytosolic | BG079790 | Mm.99776 | Energy/Metabolism |
| 1738 | | | aminopeptidase P mRNA, complete cds | | | |
| 1739 | H3045B03 | Mm.23710 | | | Mm.23710 | Energy/Metabolism |
| 1740 | | | | | | |
| 1741 | H3045B12 | solute carrier family 12, member 7 | Mus musculus solute carrier family 12, | BG079799 | Mm.155195 | Energy/Metabolism |
| 1742 | | (Slc12a7), | member 7 (Slc12a7), mRNA | | | |
| 1743 | H3045D07 | NAALADase II protein | Homo sapiens mRNA for NAALADase | BG079815 | Mm.7060 | Energy/Metabolism |
| 1744 | | | II protein | | | |
| 1745 | H3045D08 | Mm.25054 | | | Mm.25054 | Energy/Metabolism |
| 1746 | | | | | | |
| 1747 | H3045E05 | serine protease OMI (Omi), | Mus musculus serine protease OMI | BG079822 | Mm.21880 | Energy/Metabolism |
| 1748 | | | (Omi), mRNA | | | |
| 1749 | H3046A03 | DKFZP566O084 protein | Homo sapiens DKFZP566O084 protein | BG079861 | Mm.21475 | Energy/Metabolism |
| 1750 | | (DKFZPS66O084), | (DKFZP566O084), mRNA | | | |
| 1751 | H3046A12 | programmed cell death protein 7 | Mus musculus programmed cell death | BG066710 | Mm.29193 | Apoptosis |
| 1752 | | (Pdcd7), | protein 7 (Pdcd7), mRNA | | | |
| 1753 | H3046C10 | isopentenyl-diphosphate delta isomerase | Homo sapiens isopentenyl-diphosphate | BG079889 | Mm.29847 | Energy/Metabolism |
| 1754 | | (IDI1), | delta isomerase (IDI1), mRNA | | | |
| 1755 | H3047B07 | tripeptidyl peptidase II (Tpp2), | Mus musculus tripeptidyl peptidase II | BG066807 | Mm.28867 | Energy/Metabolism |
| 1756 | | | (Tpp2), mRNA | | | |
| 1757 | H3047D01 | Bos taurus creatine kinase | Bos taurus mRNA for creatine kinase, | BG079988 | Mm.970 | Energy/Metabolism |
| 1758 | | | complete cds | | | |
| 1759 | H3047D05 | gene encoding enoyl-CoA hydratase, | H. sapiens gene encoding enoyl-CoA | BG079992 | Mm.24452 | Energy/Metabolism |
| 1760 | | exons 5, 6 & 7 | hydratase, exons 5, 6 & 7 | | | |
| 1761 | H3047F02 | vacuolar-adenosine trisphosphatase (V- | Mus musculus mRNA for vacuolar- | BG079910 | Mm.25079 | Energy/Metabolism |
| 1762 | | ATPase) | adenosine trisphosphatase (V-ATPase), | | | |
| | | | complete cds | | | |
| 1763 | H3047G12 | C7-1 protein (C7-1) | Rattus norvegicus C7-1 protein (C7-1) | C80679 | Mm.21961 | Energy/Metabolism |
| 1764 | | | mRNA, complete cds | | | |
| 1765 | H3048A05 | isoprenylcysteine carboxyl | Homo sapiens isoprenylcysteine | BG080028 | Mm.44565 | Energy/Metabolism |
| 1766 | | methyltransferase (ICMT), | carboxyl methyltransferase (ICMT), | | | |
| | | | mRNA | | | |
| 1767 | H3048B11 | cytochrome c oxidase, subunit VIIc | Mus musculus cytochrome c oxidase, | BG080036 | Mm.24165 | Energy/Metabolism |
| 1768 | | (Cox7c), | subunit VIIc (Cox7c), mRNA | | | |
| 1769 | H3048E06 | small zinc finger-like protein DDP2 | Mus musculus small zinc finger-like | BG080049 | Mm.30718 | Energy/Metabolism |
| 1770 | | (Ddp2) | protein DDP2 (Ddp2) mRNA, complete | | | |
| | | | cds | | | |
| 1771 | H3048G11 | biliverdin reductase B (flavin reductase | Homo sapiens biliverdin reductase B | BG066946 | Mm.24021 | Energy/Metabolism |
| 1772 | | (NADPH)) (BLVRB), | (flavin reductase (NADPH)) (BLVRB), | | | |
| | | | mRNA | | | |
| 1773 | H3049D07 | “Mus musculus Janus kinase 2 (Jak2), | | BG080085 | Mm.25112 | Signal Transduction |
| 1774 | | mRNA” | | | | |
| 1775 | H3049F02 | carbonyl reductase 3 (CBR3), | Homo sapiens carbonyl reductase 3 | BG067014 | Mm.4512 | Energy/Metabolism |
| 1776 | | | (CBR3), mRNA | | | |
| 1777 | H3049G02 | solute carrier family 16 | Mus musculus solute carrier family 16 | BG067025 | Mm.9086 | Energy/Metabolism |
| 1778 | | (monocarboxylic acid transporters), | (monocarboxylic acid transporters), | | | |
| | | member 1 (Slc16a1), | member 1 (Slc16a1), mRNA | | | |
| 1779 | H3049G04 | “Mus musculus B-cell | | BG067027 | Mm.28782 | Signal Transduction |
| 1780 | | leukemia/lymphoma 10 (Bcl10), | | | | |
| | | mRNA” | | | | |
| 1781 | H3049G07 | PGES prostaglandin E synthase | Mus musculus PGES mRNA for | BG067030 | Mm.154682 | Energy/Metabolism |
| 1782 | | | prostaglandin E synthase, complete cds | | | |
| 1783 | H3050A12 | mannosidase 1, beta (Man1b), | Mus musculus mannosidase 1, beta | BG080131 | Mm.103874 | Energy/Metabolism |
| 1784 | | | (Man1b), mRNA | | | |
| 1785 | H3050B11 | small zinc finger-like protein (Tim13) | Mus musculus small zinc finger-like | BG080141 | Mm.142132 | Energy/Metabolism |
| 1786 | | | protein (Tim13) mRNA, complete cds | | | |
| 1787 | H3050C02 | glutathione synthetase (Gss), | Mus musculus glutathione synthetase | BG067069 | Mm.7504 | Energy/Metabolism |
| 1788 | | | (Gss), mRNA | | | |
| 1789 | H3050E05 | putative dimethyladenosine transferase | Homo sapiens putative | BG080168 | Mm.9563 | Energy/Metabolism |
| 1790 | | (HSA9761), | dimethyladenosine transferase | | | |
| | | | (HSA9761), mRNA | | | |
| 1791 | H3050E08 | diaphorase (NADH) (cytochrome b-5 | Homo sapiens diaphorase (NADH) | BG080169 | Mm.22560 | Energy/Metabolism |
| 1792 | | reductase) (DIA1), | (cytochrome b-5 reductase) (DIA1), | | | |
| | | | mRNA | | | |
| 1793 | H3050F12 | hydroxysteroid 17-beta dehydrogenase 4 | Mus musculus hydroxysteroid 17-beta | BG080183 | Mm.9569 | Energy/Metabolism |
| 1794 | | (Hsd17b4), | dehydrogenase 4 (Hsd17b4), mRNA | | | |
| 1795 | H3050G05 | solute carrier family 7 (cationic amino | Mus musculus solute carrier family 7 | BG067114 | Mm.4676 | Energy/Metabolism |
| 1796 | | acid transporter, y+ system), member 2 | (cationic amino acid transporter, y+ | | | |
| | | (Slc7a2), | system), member 2 (Slc7a2), mRNA | | | |
| 1797 | H3050H06 | “Mus musculus interferon regulatory | | BG067127 | Mm.1246 | Heat Shock/Stress |
| 1798 | | factor 1 (Irf1), mRNA” | | | | |
| 1799 | H3050H11 | Mm.25374 | | | Mm.25374 | Energy/Metabolism |
| 1800 | | | | | | |
| 1801 | H3051C06 | | | | Mm.7730 | Heat Shock/Stress |
| 1802 | | | | | | |
| 1803 | H3051C07 | “Mus musculus phospholipase D2 gene, | | BG080231 | Mm.2538 | Signal Transduction |
| 1804 | | exons 13 through 25 and complete cds” | | | | |
| 1805 | H3051D07 | cDNA FLJ13488 fis, clone | Homo sapiens cDNA FLJ13488 fis, | BG080243 | Mm.22363 | |
| 1806 | | PLACE1003915, weakly similar to | clone PLACE1003915, weakly similar | | | |
| | | PROBABLE ARGINYL-TRNA | to PROBABLE ARGINYL-TRNA | | | |
| | | SYNTHETASE, CYTOPLASMIC (EC | SYNTHETASE, CYTOPLASMIC (EC | | | |
| | | 6.1.1.19) | 6.1.1.19) | | | |
| 1807 | H3051E06 | aldehyde reductase 6, renal (Aldr6r- | Mus musculus aldehyde reductase 6, | BG080253 | Mm.21268 | Energy/Metabolism |
| 1808 | | pending), | renal (Aldr6r-pending), mRNA | | | |
| 1809 | H3051F02 | Mus musculus growth differentiation | | BG080261 | Mm.9593 | Signal Transduction |
| 1810 | | factor 9 (Gdf9), mRNA | | | | |
| 1811 | H3051G07 | guanosine monophosphate reductase | Homo sapiens guanosine | BG080277 | Mm.25808 | Energy/Metabolism |
| 1812 | | (GMPR), | monophosphate reductase (GMPR), | | | |
| | | | mRNA | | | |
| 1813 | H3052A03 | potassium channel regulator 1 | Rattus norvegicus potassium channel | BG067226 | | Energy/Metabolism |
| 1814 | | | regulator 1 mRNA, complete cds | | | |
| 1815 | H3052A04 | malate dehydrogenase, soluble (Mor2), | Mus musculus malate dehydrogenase, | BG067227 | Mm.3156 | Energy/Metabolism |
| 1816 | | | soluble (Mor2), mRNA | | | |
| 1817 | H3052B06 | ATP-binding cassette, sub-family B | Mus musculus ATP-binding cassette, | BG080311 | Mm.6404 | Energy/Metabolism |
| 1818 | | (MDR/TAP), member 1 (Abcb1), | sub-family B (MDR/TAP), member 1 | | | |
| | | | (Abcb1), mRNA | | | |
| 1819 | H3052C08 | coproporphyrinogen oxidase (Cpo), | Mus musculus coproporphyrinogen | BG080324 | Mm.35820 | Energy/Metabolism |
| 1820 | | | oxidase (Cpo), mRNA | | | |
| 1821 | H3052D11 | “Mus musculus adenylate kinase 2 | | BG067269 | Mm.29460 | Signal Transduction |
| 1822 | | (Ak2), mRNA” | | | | |
| 1823 | H3052H05 | “Homo sapiens rab3 GTPase-activating | | BG080373 | Mm.28344 | Signal Transduction |
| 1824 | | protein, non-catalytic subunit (150 kD) | | | | |
| | | (RAB3-GAP150), mRNA” | | | | |
| 1825 | H3052H11 | asparaginyl-tRNA synthetase (NARS), | Homo sapiens asparaginyl-tRNA | BG080379 | Mm.29192 | Energy/Metabolism |
| 1826 | | | synthetase (NARS), mRNA | | | |
| 1827 | H3053A12 | “Mus musculus regulator of G-protein | | BG080390 | Mm.28262 | Signal Transduction |
| 1828 | | signaling 2 mRNA, complete cds” | | | | |
| 1829 | H3053B07 | tyrosine hydroxylase (Th), | Mus musculus tyrosine hydroxylase | BG067326 | Mm.140599 | Energy/Metabolism |
| 1830 | | | (Th), mRNA | | | |
| 1831 | H3053C02 | phosphoribosyl pyrophosphate | Homo sapiens phosphoribosyl | BG080402 | Mm.25125 | Energy/Metabolism |
| 1832 | | synthetase-associated protein 1 | pyrophosphate synthetase-associated | | | |
| | | (PRPSAP1), | protein 1 (PRPSAP1), mRNA | | | |
| 1833 | H3053C09 | “Mus musculus nicotinic acetylcholine | | BG080409 | | Signal Transduction |
| 1834 | | receptor alpha 5 subunit (Acra5) | | | | |
| | | mRNA, partial cds” | | | | |
| 1835 | H3053E04 | “Mus musculus calponin 1 (Cnn1), | | BG067357 | Mm.4356 | Signal Transduction |
| 1836 | | mRNA” | | | | |
| 1837 | H3053G12 | “Mus musculus polynucleotide kinase | | BG067384 | Mm.29545 | Signal Transduction |
| 1838 | | 3′-phosphatase (Pnkp), mRNA” | | | | |
| 1839 | H3053H06 | citrin (Slc25a13) | Mus musculus citrin (Slc25a13) | BG083930 | Mm.2124 | Energy/Metabolism |
| 1840 | | | mRNA, complete cds | | | |
| 1841 | H3054B05 | “Mus musculus folate receptor 3 | | BG080476 | Mm.86738 | Signal Transduction |
| 1842 | | (Folbp3) mRNA, complete cds” | | | | |
| 1843 | H3054B12 | Nrf 2 | Mus musculus p45 NF-E2 related factor | BG067417 | Mm.1025 | |
| 1844 | | | 2 (Nrf 2) mRNA, complete cds | | | |
| 1845 | H3054C02 | Gadd45g | Mus musculus growth arrest and DNA- | BG067419 | Mm.9653 | Energy/Metabolism |
| 1846 | | | damage-inducible, gamma (Gadd45g), | | | |
| | | | mRNA | | | |
| 1847 | H3054C06 | “Mus musculus phospholipase c | | BG080489 | Mm.140 | Signal Transduction |
| 1848 | | neighboring(Png), mRNA” | | | | |
| 1849 | H3054C09 | WNT-2 | Mus musculus WNT-2 gene, partial cds; | BG080492 | Mm.43231 | Energy/Metabolism |
| 1850 | | | putative ankyrin-related protein and | | | |
| | | | cystic fibrosis transmembrane | | | |
| | | | conductance regulator (CFTR) genes, | | | |
| | | | section 2 of 2 of the complete cds; and | | | |
| | | | unknown gene | | | |
| 1851 | H3054D05 | “Rattus norvegicus protein associating | | BG080499 | | Heat Shock/Stress |
| 1852 | | with small stress protein PASS1 (Pass1) | | | | |
| | | mRNA, complete cds” | | | | |
| 1853 | H3054F04 | “Mus musculus gene for p70/p85 s6 | | BG067455 | Mm.26901 | Signal Transduction |
| 1854 | | kinase, exon” | | | | |
| 1855 | H3054F05 | lysozyme M | Mouse lysozyme M gene, exon 4 | BG067456 | Mm.654 | Energy/Metabolism |
| 1856 | | | | | | |
| 1857 | H3054F11 | ATP6N1B | Homo sapiens ATPase, H(+)- | BG080527 | Mm.26909 | Energy/Metabolism |
| 1858 | | | transporting, lysosomal, noncatalytic | | | |
| | | | accessory protein 1B (ATP6N1B), | | | |
| | | | mRNA | | | |
| 1859 | H3054F12 | TR2L | Mus musculus TR2L mRNA, partial cds | BG080528 | | Apoptosis |
| 1860 | | | | | | |
| 1861 | H3055A07 | “Homo sapiens mutated in colorectal | | BG080557 | Mm.155210 | Signal Transduction |
| 1862 | | cancers (MCC), mRNA” | | | | |
| 1863 | H3055B08 | major histocompatibility locus class III | Mus musculus major histocompatibility | | Mm.1511 | |
| 1864 | | region: butyrophilin-like protein gene, | locus class III region: butyrophilin-like | | | |
| | | partial cds; Notch4, PBX2, RAGE, | protein gene, partial cds; Notch4, | | | |
| | | lysophatidic acid acyl transferase-alpha, | PBX2, RAGE, lysophatidic acid acyl | | | |
| | | palmitoyl-protein thioestera | transferase-alpha, palmitoyl-protein | | | |
| | | | thioestera | | | |
| 1865 | H3055B10 | inhibitor of kappa light polypeptide | | | Mm.28269 | Energy/Metabolism |
| 1866 | | gene enhancer in B-cells, kinase beta | | | | |
| | | IKK[b]\|IKK2\|IKK-2\|IKK-beta | | | | |
| 1867 | H3055C04 | “Mus musculus Ras-GTPase-activating | | BG080577 | Mm.2038 | Signal Transduction |
| 1868 | | protein SH3-domain binding protein | | | | |
| | | (G3bp-pending), mRNA” | | | | |
| 1869 | H3055C05 | “Homo sapiens inositol 1,3,4- | | BG080578 | | Signal Transduction |
| 1870 | | triphosphate 5/6 kinase (ITPK1), | | | | |
| | | mRNA” | | | | |
| 1871 | H3055C10 | ATP/GTP-binding protein (HEAB), | Homo sapiens ATP/GTP-binding | BG080583 | Mm.21583 | Energy/Metabolism |
| 1872 | | | protein (HEAB), mRNA | | | |
| 1873 | H3055D02 | aldolase B, fructose-bisphosphate | Homo sapiens aldolase B, fructose- | BG080587 | Mm.87581 | Energy/Metabolism |
| 1874 | | (ALDOB), | bisphosphate (ALDOB), mRNA | | | |
| 1875 | H3055E07 | TRAF family member associated NF- | Mus musculus TRAF family member | BG080604 | Mm.1803 | Apoptosis |
| 1876 | | kappa B activator (TANK) | associated NF-kappa B activator | | | |
| | | | (TANK) mRNA, complete cds | | | |
| 1877 | H3055F07 | delta-aminolevulinate dehydratase (Lv), | Mus musculus delta-aminolevulinate | BG080616 | Mm.90076 | Energy/Metabolism |
| 1878 | | | dehydratase (Lv), mRNA | | | |
| 1879 | H3055G02 | dipeptidyl peptidase I precursor | Mus musculus dipeptidyl peptidase I | BG080623 | Mm.684 | Energy/Metabolism |
| 1880 | | | precursor mRNA, complete cds | | | |
| 1881 | H3056A09 | “M. musculus mRNA for inositol 1,4,5- | | BG067589 | Mm.7800 | Signal Transduction |
| 1882 | | trisphosphate receptor (type 2)” | | | | |
| 1883 | H3056C11 | DKFZP564O2082 protein | Homo sapiens DKFZP564O2082 | | Mm.21826 | |
| 1884 | | (DKFZP564O2082), | protein (DKFZP564O2082), mRNA | | | |
| 1885 | H3056D03 | “Homo sapiens calponin 3, acidic | | BG080757 | Mm.22171 | Signal Transduction |
| 1886 | | (CNN3), mRNA” | | | | |
| 1887 | H3056G10 | thioredoxin 2 (TRX2) | Homo sapiens thioredoxin 2 (TRX2) | BG080633 | Mm.3533 | Energy/Metabolism |
| 1888 | | | mRNA, complete cds | | | |
| 1889 | H3056H05 | H3056H05 | | | | Energy/Metabolism |
| 1890 | | | | | | |
| 1891 | H3057C01 | “Mus musculus interferon-related | | BG067699 | Mm.168 | Heat Shock/Stress |
| 1892 | | developmental regulator 1 (Ifrd1), | | | | |
| | | mRNA” | | | | |
| 1893 | H3057C08 | GPX3 | | | Mm.7156 | Energy/Metabolism |
| 1894 | | | | | | |
| 1895 | H3057C10 | bisphosphate 3-nucleotidase 1 (Bpnt1), | Mus musculus bisphosphate 3- | BG067708 | Mm.18096 | Energy/Metabolism |
| 1896 | | | nucleotidase 1 (Bpnt1), mRNA | | | |
| 1897 | H3057D09 | acetyl-Coenzyme A carboxylase beta | Homo sapiens acetyl-Coenzyme A | BG067718 | Mm.88548 | Energy/Metabolism |
| 1898 | | (ACACB), | carboxylase beta (ACACB), mRNA | | | |
| 1899 | H3057E05 | “Mus musculus protein tyrosine | | BG080698 | Mm.4420 | Signal Transduction |
| 1900 | | phosphatase, non-receptor type 21 | | | | |
| | | (Ptpn21), mRNA” | | | | |
| 1901 | H3057F01 | “Mus musculus casein kinase 1, epsilon | | BG080793 | Mm.30199 | Signal Transduction |
| 1902 | | (Csnkle), mRNA” | | | | |
| 1903 | H3057H04 | “Mus musculus HSP40-like protein | | BG080820 | Mm.46746 | Heat Shock/Stress |
| 1904 | | mRNA, partial sequence” | | | | |
| 1905 | H3057H06 | solute carrier family 16 | Mus musculus solute carrier family 16 | C87415 | Mm.5045 | Energy/Metabolism |
| 1906 | | (monocarboxylic acid transporters), | (monocarboxylic acid transporters), | | | |
| | | member 2 (Slc16a2), | member 2 (Slc16a2), mRNA | | | |
| 1907 | H3058A10 | Fas-interacting serine/threonine kinase 3 | Mus musculus Fas-interacting | BG080836 | Mm.29026 | Apoptosis |
| 1908 | | (Fist3) | serine/threonine kinase 3 (Fist3) mRNA, | | | |
| | | | complete cds | | | |
| 1909 | H3058C03 | Bcl2-like 10 (Bcl2110), | Mus musculus Bcl2-like 10 (Bcl2110), | BG080862 | Mm.25988 | Apoptosis |
| 1910 | | | mRNA | | | |
| 1911 | H3058C09 | “Mus musculus Jun oncogene (Jun), | | BG080846 | Mm.482 | Signal Transduction |
| 1912 | | mRNA” | | | | |
| 1913 | H3058D09 | “Mus musculus guanine nucleotide | | BG080868 | Mm.27307 | Signal Transduction |
| 1914 | | binding protein (G protein), gamma 3 | | | | |
| | | subunit (Gng3), mRNA” | | | | |
| 1915 | H3058G06 | transient receptor potential-related | Mus musculus transient receptor | BG080898 | Mm.143646 | Energy/Metabolism |
| 1916 | | protein (ChaK), | potential-related protein (ChaK), mRNA | | | |
| 1917 | H3059A10 | sodium bicarbonate cotransporter isom 3 | Mus musculus sodium bicarbonate | BG067865 | Mm.34957 | Energy/Metabolism |
| 1918 | | (kNBC-3), | cotransporter isoform 3 (kNBC-3), | | | |
| | | | mRNA | | | |
| 1919 | H3059B02 | “Homo sapiens regulator of G-protein | | BG067869 | Mm.31378 | Signal Transduction |
| 1920 | | signalling 12 (RGS12), mRNA” | | | | |
| 1921 | H3059B03 | “Mus musculus protein kinase C delta | | BG080928 | Mm.142839 | Signal Transduction |
| 1922 | | mRNA, complete cds” | | | | |
| 1923 | H3059B07 | “Mus sp. JAK1 protein tyrosine kinase | | BG067874 | Mm.28598 | Signal Transduction |
| 1924 | | mRNA, complete cds” | | | | |
| 1925 | H3059D07 | alanyl-tRNA synthetase (AARS), | Homo sapiens alanyl-tRNA synthetase | BG080951 | Mm.24174 | Energy/Metabolism |
| 1926 | | | (AARS), mRNA | | | |
| 1927 | H3059D11 | KIAA1093 protein, partial cds | Homo sapiens mRNA for KIAA1093 | BG067897 | Mm.22829 | Apoptosis |
| 1928 | | | protein, partial cds | | | |
| 1929 | H3059F12 | “Mus musculus GTP binding protein | | BG067921 | Mm.15793 | Signal Transduction |
| 1930 | | (GTP2) mRNA, complete cds” | | | | |
| 1931 | H3059G11 | intronless glutamine synthetase gene | Mouse intronless glutamine synthetase | BG067932 | Mm.41660 | Energy/Metabolism |
| 1932 | | | gene, complete cds | | | |
| 1933 | H3060A10 | M. musculus arachidonate epidermis- | M. musculus mRNA for arachidonate | BG067951 | Mm.1122 | Energy/Metabolism |
| 1934 | | type 12(S)-lipoxygenase | epidermis-type 12(S)-lipoxygenase | | | |
| 1935 | H3060B09 | “Homo sapiens mitogen-activated | | BG081019 | Mm.24022 | Signal Transduction |
| 1936 | | protein kinase kinase kinase kinase 5 | | | | |
| | | (MAP4K5), mRNA” | | | | |
| 1937 | H3060D04 | Mm.24594 | | | Mm.24594 | Energy/Metabolism |
| 1938 | | | | | | |
| 1939 | H3060H04 | “Mus musculus JNK-binding protein 1 | | BG081077 | Mm.25540 | Signal Transduction |
| 1940 | | (Jnkbp1-pending), mRNA” | | | | |
| 1941 | H3060H07 | Mm.25580 | | | Mm.25580 | Energy/Metabolism |
| 1942 | | | | | | |
| 1943 | H3061B06 | UDP-N-acetyl-alpha-D- | Mus musculus UDP-N-acetyl-alpha-D- | BG068045 | Mm.38441 | Energy/Metabolism |
| 1944 | | galactosamine: polypeptide N- | galactosamine: polypeptide N- | | | |
| | | acetylgalactosaminyltransferase 3 | acetylgalactosaminyltransferase 3 | | | |
| | | (Galnt3), | (Galnt3), mRNA | | | |
| 1945 | H3061E04 | cysteine dioxygenase, type I (CDO1), | Homo sapiens cysteine dioxygenase, | BG081135 | Mm.29996 | Energy/Metabolism |
| 1946 | | | type I (CDO1), mRNA | | | |
| 1947 | H3061H08 | guanine deaminase (Gda), | Mus musculus guanine deaminase | BG081171 | | Energy/Metabolism |
| 1948 | | | (Gda), mRNA | | | |
| 1949 | H3062C04 | spermine synthase (Sms), | Mus musculus spermine synthase (Sms), | BG081202 | | Energy/Metabolism |
| 1950 | | | mRNA | | | |
| 1951 | H3062E02 | isocitrate dehydrogenase | Mus musculus isocitrate dehydrogenase | BG081213 | Mm.18213 | Energy/Metabolism |
| 1952 | | | mRNA, complete cds | | | |
| 1953 | H3062H07 | “Mus musculus inositol 1,4,5- | | BG081243 | Mm.2726 | Signal Transduction |
| 1954 | | triphosphate receptor 1 (Itpr1), mRNA” | | | | |
| 1955 | H3062H08 | Mm.11827 | | | Mm.11827 | Energy/Metabolism |
| 1956 | | | | | | |
| 1957 | H3063A03 | “Mus musculus calpain 7 (Capn7), | | BG081250 | Mm.142370 | Signal Transduction |
| 1958 | | mRNA” | | | | |
| 1959 | H3063A08 | Prsc1 | Mus musculus protease, cysteine, 1 | BG068219 | Mm.17185 | Energy/Metabolism |
| 1960 | | | (Prsc1), mRNA | | | |
| 1961 | H3063A09 | “Mus musculus novel ras effector 1 | | BG068220 | Mm.10133 | Signal Transduction |
| 1962 | | (Norel-pending), mRNA” | | | | |
| 1963 | H3063C09 | beta-1,4-galactosyltransferase VI | Mus musculus beta-1,4- | BG081279 | Mm.26364 | Energy/Metabolism |
| 1964 | | | galactosyltransferase VI mRNA, | | | |
| | | | complete cds | | | |
| 1965 | H3063H10 | LAT2 (Slc7a8) | Mus musculus mRNA for LAT2 protein | BG068299 | Mm.27830 | Energy/Metabolism |
| 1966 | | | (Slc7a8 gene) | | | |
| 1967 | H3064C02 | “Mus musculus large tumor suppressor | | BG081357 | Mm.35642 | Signal Transduction |
| 1968 | | 1 (Lats1) mRNA, partial cds” | | | | |
| 1969 | H3064C04 | kinesin-like 5 (mitotic kinesin-like | Homo sapiens kinesin-like 5 (mitotic | | Mm.28386 | Cell Cycle |
| 1970 | | protein 1) (KNSL5), | kinesin-like protein 1) (KNSL5), mRNA | | | |
| 1971 | H3064E02 | vacuolar adenosine triphosphatase | Mus musculus vacuolar adenosine | BG081377 | Mm.29771 | Energy/Metabolism |
| 1972 | | subunit A gene | triphosphatase subunit A gene, complete | | | |
| | | | cds | | | |
| 1973 | H3064H04 | HMG box protein | Mus musculus HMG box protein | | Mm.41766 | Transcription/Chromatin |
| 1974 | | | mRNA, complete cds | | | |
| 1975 | H3065C08 | “Mus musculus calmodulin dependent | | BG081448 | Mm.24381 | Signal Transduction |
| 1976 | | phosphatase catalytic subunit (Cam-Prp) | | | | |
| | | mRNA, 3′ end” | | | | |
| 1977 | H3065C11 | “Mus musculus Chetk-alpha gene for | | BG081451 | | Signal Transduction |
| 1978 | | choline/ethanolamine kinase-alpha, | | | | |
| | | exon 1 and 5′-flanking region” | | | | |
| 1979 | H3065D10 | “Homo sapiens RAP1A, member of | | BG068432 | Mm.144498 | Signal Transduction |
| 1980 | | RAS oncogene family (RAP1A), | | | | |
| | | mRNA” | | | | |
| 1981 | H3065E07 | UDP-glucose dehydrogenase (Ugdh), | Mus musculus UDP-glucose | BG068439 | Mm.10709 | Energy/Metabolism |
| 1982 | | | dehydrogenase (Ugdh), mRNA | | | |
| 1983 | H3066H07 | heme oxygenase-2 | Mus musculus heme oxygenase-2 | BG081591 | | Energy/Metabolism |
| 1984 | | | mRNA, complete cds | | | |
| 1985 | H3067A07 | potassium channel modulatory factor | Mus musculus potassium channel | BG081603 | Mm.29194 | Energy/Metabolism |
| 1986 | | DEBT-91 (Debt91), | modulatory factor DEBT-91 (Debt91), | | | |
| | | | mRNA | | | |
| 1987 | H3067B08 | “Mus musculus phosphoinositide 3- | | BG081616 | Mm.3058 | Signal Transduction |
| 1988 | | kinase regulatory subunit p85alpha | | | | |
| | | mRNA, complete cds” | | | | |
| 1989 | H3067E02 | “Mus musculus RAS-related C3 | | BG068616 | Mm.29014 | Signal Transduction |
| 1990 | | botulinum substrate 1, guanine | | | | |
| | | nucleotide exchange factor 1 (Racgefl- | | | | |
| | | pending), mRNA” | | | | |
| 1991 | H3068A08 | kinesin-like 5 (mitotic kinesin-like | Homo sapiens kinesin-like 5 (mitotic | | Mm.28386 | Cell Cycle |
| 1992 | | protein 1) (KNSL5), | kinesin-like protein 1) (KNSL5), mRNA | | | |
| 1993 | H3068A11 | ferritin light chain 1 (Ftl1), | Mus musculus ferritin light chain 1 | BG081695 | | Energy/Metabolism |
| 1994 | | | (Ftl1), mRNA | | | |
| 1995 | H3068F03 | ornithine decarboxylase antizyme | Mus musculus ornithine decarboxylase | BG081746 | Mm.104010 | Energy/Metabolism |
| 1996 | | inhibitor (Oazi), | antizyme inhibitor (Oazi), mRNA | | | |
| 1997 | H3069C09 | “Mus musculus Rho-associated coiled- | | BG081800 | Mm.6710 | Signal Transduction |
| 1998 | | coil forming kinase 1 (Rock1), mRNA” | | | | |
| 1999 | H3069D09 | cDNA FLJ12814 fis, clone | Homo sapiens cDNA FLJ12814 fis, | BG081823 | Mm.27228 | Energy/Metabolism |
| 2000 | | NT2RP2002520, weakly similar to | clone NT2RP2002520, weakly similar | | | |
| | | transcription factor RFX-B (RFXB) | to Homo sapiens transcription factor | | | |
| | | | RFX-B (RFXB) mRNA | | | |
| 2001 | H3069G01 | choline/ethanolaminephosphotransferase | Homo sapiens | BG081849 | Mm.14816 | Energy/Metabolism |
| 2002 | | (CEPT1), | choline/ethanolaminephosphotransferase | | | |
| | | | (CEPT1), mRNA | | | |
| 2003 | H3070A09 | RHOA proto-oncogene multi-drug- | Homo sapiens RHOA proto-oncogene | BG081880 | Mm.757 | Energy/Metabolism |
| 2004 | | resistance protein, 3 end | multi-drug-resistance protein mRNA, 3 | | | |
| | | | end | | | |
| 2005 | H3070A12 | quinoid dihydropteridine reductase | Homo sapiens quinoid dihydropteridine | BG081883 | Mm.30204 | Energy/Metabolism |
| 2006 | | (QDPR), | reductase (QDPR), mRNA | | | |
| 2007 | H3070B09 | partial Kcnq1 gene potassium channel | Mus musculus partial Kcnq1 gene for | BG081892 | | Energy/Metabolism |
| 2008 | | protein, exons 10-14 | potassium channel protein, exons 10-14 | | | |
| 2009 | H3070C08 | hydroxysteroid dehydrogenase-1, | Mus musculus hydroxysteroid | BG081903 | Mm.16941 | Energy/Metabolism |
| 2010 | | delta<5>-3-beta (Hsd3b1), | dehydrogenase-1, delta<5>-3-beta | | | |
| | | | (Hsd3b1), mRNA | | | |
| 2011 | H3070E04 | ATP-specific succinyl-CoA synthetase | Mus musculus ATP-specific succinyl- | BG068897 | Mm.19154 | Energy/Metabolism |
| 2012 | | beta subunit (Scs), partial cds | CoA synthetase beta subunit (Scs) | | | |
| | | | mRNA, partial cds | | | |
| 2013 | H3071A03 | ATPase, class VI, type 11A (Atp11a), | Mus musculus ATPase, class VI, type | BG081967 | Mm.148756 | Energy/Metabolism |
| 2014 | | | 11A (Atp11a), mRNA | | | |
| 2015 | H3071G11 | “Homo sapiens RAP2B, member of | | BG082041 | Mm.26939 | Signal Transduction |
| 2016 | | RAS oncogene family (RAP2B), | | | | |
| | | mRNA” | | | | |
| 2017 | H3071H04 | glycerol-3-phosphate acyltransferase | Mouse glycerol-3-phosphate | | Mm.87773 | |
| | | | acyltransferase mRNA, complete cds | | | |
| 2018 | H3072A08 | glyceraldehyde-3-phosphate | Mus musculus glyceraldehyde-3- | BG082061 | | Energy/Metabolism |
| 2019 | | dehydrogenase (Gapd) | phosphate dehydrogenase (Gapd), | | | |
| | | | mRNA | | | |
| 2020 | H3072B11 | “Mus musculus PLC-L2 mRNA for | | BG069051 | Mm.28034 | Signal Transduction |
| 2021 | | phospholipase C-L2, complete cds” | | | | |
| 2022 | H3072F03 | Mm.22651 | | | Mm.22651 | Energy/Metabolism |
| 2023 | | | | | | |
| 2024 | H3072G09 | potassium voltage-gated channel, | Mus musculus potassium voltage-gated | BG069106 | Mm.4489 | Energy/Metabolism |
| 2025 | | subfamily H (eag-related), member 1 | channel, subfamily H (eag-related), | | | |
| | | (Kcnh1), | member 1 (Kcnh1), mRNA | | | |
| 2026 | H3073F09 | Mm.27123 | | | Mm.27123 | Energy/Metabolism |
| 2027 | | | | | | |
| 2028 | H3073F10 | “Mus musculus 80 kDa m-calpain | | BG082209 | Mm.6958 | Signal Transduction |
| 2029 | | subunit (calp80) mRNA, complete cds” | | | | |
| 2030 | H3073G07 | granzyme M | Mus musculus mRNA for granzyme M, | BG082217 | Mm.22302 | Energy/Metabolism |
| 2031 | | | complete cds | | | |
| 2032 | H3074A02 | inhibitor of apoptosis protein 1 | Mus musculus inhibitor of apoptosis | BG069214 | Mm.2026 | Apoptosis |
| 2033 | | | protein 1 mRNA, complete cds | | | |
| 2034 | H3074A03 | NIMA (never in mitosis gene a)-related | Mus musculus NIMA (never in mitosis | | Mm.143817 | Cell Cycle |
| 2035 | | expressed kinase 7 (Nek7), | gene a)-related expressed kinase 7 | | | |
| | | | (Nek7), mRNA | | | |
| 2036 | H3074C12 | dUTPase | Mus musculus dUTPase mRNA, | BG082266 | | Energy/Metabolism |
| 2037 | | | complete cds | | | |
| 2038 | H3074F08 | “Mus musculus protein phosphatase | | BG082298 | Mm.11711 | Signal Transduction |
| 2039 | | type 2A catalytic subunit alpha isoform | | | | |
| | | mRNA, complete cds” | | | | |
| 2040 | H3074G02 | H. sapiens 40 kDa protein kinase related | H. sapiens 40 kDa protein kinase related | | Mm.1700 | |
| 2041 | | to rat ERK2 | to rat ERK2 | | | |
| 2042 | H3074H09 | NAALADase II protein | Homo sapiens mRNA for NAALADase | BG082322 | Mm.26132 | Energy/Metabolism |
| 2043 | | | II protein | | | |
| 2044 | H3075A04 | Mm.26128 | | | Mm.26128 | Energy/Metabolism |
| 2045 | | | | | | |
| 2046 | H3075A09 | esterase-22 = endoplasmic reticulum- | esterase-22 = endoplasmic reticulum- | BG069315 | Mm.29110 | Energy/Metabolism |
| 2047 | | targeting protein of beta-glucuronidase | targeting protein of beta-glucuronidase | | | |
| | | [mice,, 2022 nt] | [mice, mRNA, 2022 nt] | | | |
| 2048 | H3075F01 | ATP-specific succinyl-CoA synthetase | Mus musculus ATP-specific succinyl- | BG069442 | Mm.19154 | Energy/Metabolism |
| 2049 | | beta subunit (Scs), partial cds | CoA synthetase beta subunit (Scs) | | | |
| | | | mRNA, partial cds | | | |
| 2050 | H3075F08 | F1F0-ATP synthase, g subunit | Mus musculus mRNA for F1F0-ATP | BG082389 | Mm.14663 | Energy/Metabolism |
| 2051 | | | synthase, g subunit | | | |
| 2052 | H3075F11 | “Mus musculus heat shock protein 20- | | BG069463 | Mm.21549 | Heat Shock/Stress |
| 2053 | | like protein mRNA, complete cds” | | | | |
| 2054 | H3075G06 | molybdenum cofactor synthesis-step 1 | Mus musculus molybdenum cofactor | BG082399 | Mm.36112 | Energy/Metabolism |
| 2055 | | proteins A and B splice type I (Mocs1) | synthesis-step 1 proteins A and B splice | | | |
| | | s, partial cds, alternatively spliced | type I (Mocs1) mRNAs, partial cds, | | | |
| | | | alternatively spliced | | | |
| 2056 | H3075H02 | peptidyl arginine deiminase, type II | Mus musculus peptidyl arginine | BG082407 | Mm.2296 | Energy/Metabolism |
| 2057 | | (Pdi2), | deiminase, type II (Pdi2), mRNA | | | |
| 2058 | H3076B05 | “Mus musculus Rho interacting protein | | BG069493 | Mm.4620 | Signal Transduction |
| 2059 | | 2 (Rhoip2-pending), mRNA” | | | | |
| 2060 | H3076C12 | fatty-acid-Coenzyme A ligase, long- | Homo sapiens fatty-acid-Coenzyme A | BG069344 | Mm.12166 | Energy/Metabolism |
| 2061 | | chain 4 (FACL4), | ligase, long-chain 4 (FACL4), mRNA | | | |
| 2062 | H3076F04 | “AC005290, complete sequence [Mus | | BG069372 | Mm.1967 | Signal Transduction |
| 2063 | | musculus]” | | | | |
| 2064 | H3076F12 | “Homo sapiens regulator of G protein | | BG082484 | Mm.31378 | Signal Transduction |
| 2065 | | signaling RGS12 (RGS) mRNA, | | | | |
| | | complete cds” | | | | |
| 2066 | H3076G06 | “Mus musculus signal transducer and | | BG069385 | Mm.21935 | Signal Transduction |
| 2067 | | activator of transcription 2 (Stat2), | | | | |
| | | mRNA” | | | | |
| 2068 | H3076G11 | similar to argininosuccinate lyase (H. sapiens) | Homo sapiens similar to | BG082495 | Mm.23869 | Energy/Metabolism |
| 2069 | | (LOC63402), | argininosuccinate lyase (H. sapiens) | | | |
| | | | (LOC63402), mRNA | | | |
| 2070 | H3076H06 | “Mus musculus adenylate kinase 4 | | BG082501 | Mm.142051 | Signal Transduction |
| 2071 | | (Ak4), mRNA” | | | | |
| 2072 | H3076H10 | “Mus musculus casein kinase II, alpha | | BG069401 | Mm.28881 | Signal Transduction |
| 2073 | | 2, polypeptide (Csnk2a2), mRNA” | | | | |
| 2074 | H3077B02 | solute carrier family 12, member 2 | Mus musculus solute carrier family 12, | BG069505 | Mm.4168 | Energy/Metabolism |
| 2075 | | (Slc12a2), | member 2 (Slc12a2), mRNA | | | |
| 2076 | H3077C01 | X28 region near ALD locus containing | Homo sapiens X28 region near ALD | BG069516 | Mm.28056 | Energy/Metabolism |
| 2077 | | dual specificity phosphatase 9 (DUSP9), | locus containing dual specificity | | | |
| | | ribosomal protein L18a (RPL18a), | phosphatase 9 (DUSP9), ribosomal | | | |
| | | Ca2+/Calmodulin-dependent protein | protein L18a (RPL18a), | | | |
| | | kinase I (CAMKI), creatine transporter ( | Ca2+/Calmodulin-dependent protein | | | |
| | | | kinase I (CAMKI), creatine transporter ( | | | |
| 2078 | H3077F08 | ATPase, H(+)-transporting, lysosomal, | Homo sapiens ATPase, H(+)- | BG082574 | Mm.26909 | Energy/Metabolism |
| 2079 | | noncatalytic accessory protein 1B | transporting, lysosomal, noncatalytic | | | |
| | | (ATP6N1B), | accessory protein 1B (ATP6N1B), | | | |
| | | | mRNA | | | |
| 2080 | H3077H01 | hypothetical protein FLJ10726 | Homo sapiens hypothetical protein | | Mm.30718 | |
| 2081 | | (FLJ10726), | FLJ10726 (FLJ10726), mRNA | | | |
| 2082 | H3078G02 | NIMA (never in mitosis gene a)-related | Mus musculus NIMA (never in mitosis | | Mm.143817 | Cell Cycle |
| 2083 | | expressed kinase 7 (Nek7), | gene a)-related expressed kinase 7 | | | |
| | | | (Nek7), mRNA | | | |
| 2084 | H3078H09 | Rat L-gulono-gamma-lactone oxidase | Rat L-gulono-gamma-lactone oxidase | BG082674 | Mm.26207 | Energy/Metabolism |
| 2085 | | | mRNA, complete cds | | | |
| 2086 | H3078H11 | TRPM-2, cytosolic epoxide hydrolase, | Homo sapiens TRPM-2, cytosolic | BG082676 | Mm.26207 | Energy/Metabolism |
| 2087 | | nicotinic acetylcholine receptor alpha2 | epoxide hydrolase, nicotinic | | | |
| | | subunit, and focal adhesion kinase | acetylcholine receptor alpha2 subunit, | | | |
| | | genes, sequence | and focal adhesion kinase genes, | | | |
| | | | complete cds, complete sequence | | | |
| 2088 | H3079D11 | solute carrier family 12, member 2 | Mus musculus solute carrier family 12, | BG069726 | Mm.4168 | Energy/Metabolism |
| 2089 | | (Slc12a2), | member 2 (Slc12a2), mRNA | | | |
| 2090 | H3079D12 | “Mus musculus phospholipase D3 | | BG069727 | Mm.6483 | Signal Transduction |
| 2091 | | (Pld3), mRNA” | | | | |
| 2092 | H3079E06 | “Mus musculus interferon regulatory | | BG069733 | Mm.4179 | Heat Shock/Stress |
| 2093 | | factor 6 (Irf6), mRNA” | | | | |
| 2094 | H3079F01 | cDNA: FLJ22083 fis, clone HEP14459, | Homo sapiens cDNA: FLJ22083 fis, | BG069739 | Mm.22675 | Energy/Metabolism |
| 2095 | | highly similar to HUM3H3M 3- | clone HEP14459, highly similar to | | | |
| | | hydroxy-3-methylglutaryl coenzyme A | HUM3H3M Homo sapiens 3-hydroxy- | | | |
| | | synthase | 3-methylglutaryl coenzyme A synthase | | | |
| | | | mRNA | | | |
| 2096 | H3079F05 | “Mus musculus calcyclin binding | | BG069742 | Mm.10702 | Signal Transduction |
| 2097 | | protein (CACYBP) mRNA, partial cds” | | | | |
| 2098 | H3079G04 | cystathionine beta-synthase (CBS) gene, | Homo sapiens cystathionine beta- | BG082744 | Mm.24225 | Energy/Metabolism |
| 2099 | | major and minor alternative splice | synthase (CBS) gene, major and minor | | | |
| | | products | alternative splice products, complete | | | |
| | | | cds | | | |
| 2100 | H3079G06 | “Mus musculus interferon regulatory | | BG069754 | Mm.3960 | Heat Shock/Stress |
| 2101 | | factor 3 (Irf3), mRNA” | | | | |
| 2102 | H3079G12 | cDNA DKFZp727E011 (from clone | Homo sapiens mRNA; cDNA | BG082752 | Mm.24225 | Energy/Metabolism |
| 2103 | | DKFZp727E011); partial cds | DKFZp727E011 (from clone | | | |
| | | | DKFZp727E011); partial cds | | | |
| 2104 | H3079H11 | M. musculus RPS3a gene | M. musculus RPS3a gene | BG069771 | Mm.6957 | Apoptosis |
| 2105 | | | | | | |
| 2106 | H3080A09 | “Homo sapiens similar to cullin 5 (H. | | BG069781 | Mm.21710 | Signal Transduction |
| 2107 | | sapiens)(LOC63330), mRNA” | | | | |
| 2108 | H3080B11 | TF-1 cell apoptosis related protein-15 | Mus musculus TF-1 cell apoptosis | BG069793 | Mm.28441 | Apoptosis |
| 2109 | | (Tfar15), | related protein-15 (Tfar15), mRNA | | | |
| 2110 | H3080G08 | Mus musculus ribonuclease P2 | | BG069849 | Mm.12440 | Energy/Metabolism |
| 2111 | | (Rnasep2-pending), mRNA | | | | |
| 2112 | H3080G10 | “Mus musculus adenomatosis polyposis | | BG069851 | Mm.7883 | Signal Transduction |
| 2113 | | coli (Apc), mRNA” | | | | |
| 2114 | H3080H10 | Mus musculus RNA guanylyltransferase | | BG069862 | Mm.26153 | Energy/Metabolism |
| 2115 | | and 5-phosphatase (Rngtt), mRNA | | | | |
| 2116 | H3081A12 | fatty acid-Coenzyme A ligase, long | Mus musculus fatty acid-Coenzyme A | BG069876 | Mm.143689 | Energy/Metabolism |
| 2117 | | chain 4 (Facl4), | ligase, long chain 4 (Facl4), mRNA | | | |
| 2118 | H3081D02 | Bcl-2-related ovarian killer protein-like- | Mus musculus Bcl-2-related ovarian | BG082842 | Mm.3295 | Apoptosis |
| 2119 | | pending (Bokl-pending), | killer protein-like-pending (Bokl- | | | |
| | | | pending), mRNA | | | |
| 2120 | H3081E08 | TNF-alpha converting enzyme | Mus musculus TNF-alpha converting | BG082857 | Mm.27681 | Apoptosis |
| 2121 | | precursor,, alternatively spliced | enzyme precursor, mRNA, alternatively | | | |
| | | | spliced, complete cds | | | |
| 2122 | H3081H02 | aldo-keto reductase AKR1C13 | Mus musculus aldo-keto reductase | BG082884 | Mm.27447 | Energy/Metabolism |
| 2123 | | (Akr1c13), | AKR1C13 (Akr1c13), mRNA | | | |
| 2124 | H3082B04 | Mus musculus inducible 6- | | BG070045 | Mm.19669 | Energy/Metabolism |
| 2125 | | phosphofructo-2-kinase mRNA, | | | | |
| | | complete cds | | | | |
| 2126 | H3082C01 | Mus musculus serine protease inhibitor | | BG070053 | Mm.89871 | Energy/Metabolism |
| 2127 | | 1-5 (Spi1-5), mRNA | | | | |
| 2128 | H3082E03 | Mus musculus programmed cell death 8 | | BG082930 | Mm.30050 | Apoptosis |
| 2129 | | (apoptosis inducing factor) (Pdcd8), | | | | |
| | | mRNA | | | | |
| 2130 | H3082E10 | H. sapiens mitogen inducible gene mig- | | | Mm.29842 | Signal Transduction |
| 2131 | | 2, complete CDS | | | | |
| 2132 | H3082F03 | M. musculus (balb-c) gene for | | BG082939 | Mm.4628 | Energy/Metabolism |
| 2133 | | sphingomyelin phosphodiesterase | | | | |
| 2134 | H3083C01 | Homo sapiens kinesin-like 5 (mitotic | | | Mm.28386 | Cell Cycle |
| 2135 | | kinesin-like protein 1) (KNSL5), mRNA | | | | |
| 2136 | H3083D06 | Mus musculus Bcl2-associated | | BG069990 | Mm.688 | Apoptosis |
| 2137 | | athanogene 1 (Bag1), mRNA | | | | |
| 2138 | H3083D09 | Homo sapiens cDNA FLJ14310 fis, | | BG069993 | Mm.7156 | Energy/Metabolism |
| 2139 | | clone PLACE3000271 | | | | |
| 2140 | H3083E02 | “Mus musculus beta-site APP cleaving | | BG069998 | Mm.24044 | Signal Transduction |
| | | enzyme (Bace), mRNA” | | | | |
| 2141 | H3083H02 | “Mus musculus guanine nucleotide | | BG070116 | Mm.5305 | Signal Transduction |
| 2142 | | binding protein, beta-2, related | | | | |
| | | sequence 1 (Gnb2-rs1), mRNA” | | | | |
| 2143 | H3083H05 | Mus musculus mRNA for tumor | | BG070119 | Mm.27681 | Energy/Metabolism |
| 2144 | | necrosis factor alpha converting enzyme | | | | |
| | | (TACE/ADAM17), complete cds | | | | |
| 2145 | H3084E05 | glutathione S-transferase, mu 5 (Gstm5), | Mus musculus glutathione S-transferase, | BG070174 | Mm.667 | Energy/Metabolism |
| 2146 | | | mu 5 (Gstm5), mRNA | | | |
| 2147 | H3084F02 | Mm.24864 | | | Mm.24864 | Energy/Metabolism |
| 2148 | | | | | | |
| 2149 | H3084G03 | Mouse c-fos gene; cellular homolog to | | BG070196 | Mm.5043 | Signal Transduction |
| 2150 | | viral oncogene | | | | |
| 2151 | H3085B01 | M. musculus mRNA for casein kinase I- | | BG083155 | Mm.43737 | Signal Transduction |
| 2152 | | alpha | | | | |
| 2153 | H3085C02 | Mus musculus Traf and Tnf receptor | | BG070243 | Mm.155228 | Apoptosis |
| 2154 | | associated protein (Ttrap-pending), | | | | |
| | | mRNA | | | | |
| 2155 | H3085C04 | Mus musculus solute carrier family 12, | | BG070245 | Mm.4168 | Energy/Metabolism |
| 2156 | | member 2 (Slc12a2), mRNA | | | | |
| 2157 | H3085D10 | Mus musculus guanine deaminase | | BG083182 | Mm.25912 | Energy/Metabolism |
| 2158 | | (Gda), mRNA | | | | |
| 2159 | H3085G03 | Mouse cytochrome beta-558 mRNA, 3 | | BG083209 | Mm.448 | Energy/Metabolism |
| 2160 | | end | | | | |
| 2161 | H3086E09 | Homo sapiens BCL2-associated | | BG070363 | Mm.44239 | Apoptosis |
| 2162 | | athanogene 5 (BAG5), mRNA | | | | |
| 2163 | H3086F10 | B. taurus CI-SGDH mRNA for | | BG083295 | Mm.28058 | Energy/Metabolism |
| 2164 | | ubiquinone oxidoreductase complex | | | | |
| 2165 | H3086H09 | “Mus musculus mRNA for Rho guanine | | BG083317 | Mm.22261 | Signal Transduction |
| 2166 | | nucleotide-exchange factor, splice | | | | |
| | | variant NET1A” | | | | |
| 2167 | H3087A12 | uterine lactotransferrin | Mouse uterine lactotransferrin mRNA | BG070413 | Mm.7612 | Energy/Metabolism |
| 2168 | | | | | | |
| 2169 | H3087C10 | “Mus musculus rho GTPase activating | | BG083351 | | Signal Transduction |
| 2170 | | protein 6 (Arhgap6), mRNA” | | | | |
| 2171 | H3087G09 | “Mus musculus heat shock protein 030 | | BG070480 | Mm.104491 | Heat Shock/Stress |
| 2172 | | (Hsp030), mRNA” | | | | |
| 2173 | H3087H05 | acetoacetyl-coenzyme A thiolase (EC | Human mRNA for acetoacetyl- | BG083405 | Mm.1776 | Energy/Metabolism |
| 2174 | | 2.3.1.9) | coenzyme A thiolase (EC 2.3.1.9) | | | |
| 2175 | H3087H09 | “Mus musculus calcium binding protein | | BG083409 | Mm.1221 | Signal Transduction |
| 2176 | | A6 (calcyclin) (S100a6), mRNA” | | | | |
| 2177 | H3088A07 | glutathione S-transferase, mu 2 (Gstm2), | Mus musculus glutathione S-transferase, | BG070501 | Mm.7446 | Energy/Metabolism |
| 2178 | | | mu 2 (Gstm2), mRNA | | | |
| 2179 | H3088C12 | CPP32 apoptotic protease, partial cds | Mus musculus CPP32 apoptotic | BG083524 | Mm.153450 | Apoptosis |
| 2180 | | | protease mRNA, partial cds | | | |
| 2181 | H3088E07 | “Mus musculus choline kinase (Chk), | | BG070547 | Mm.5262 | Signal Transduction |
| 2182 | | mRNA” | | | | |
| 2183 | H3088F03 | “Mus musculus protein tyrosine | | BG083549 | Mm.4124 | Signal Transduction |
| 2184 | | phosphatase 4a3 (Ptp4a3), mRNA” | | | | |
| 2185 | H3089A06 | Mus musculus ATPase, H+ | | BG083588 | Mm.10727 | Energy/Metabolism |
| 2186 | | transporting, lysosomal (vacuolar | | | | |
| | | proton pump), beta 56/58 kDa, isoform | | | | |
| | | 2 (Atp6b2), mRNA | | | | |
| 2187 | H3089A11 | Mus musculus ATP-binding cassette | | BG083593 | Mm.21629 | Energy/Metabolism |
| 2188 | | protein (Abcf2) mRNA, partial cds | | | | |
| 2189 | H3089F09 | “Mus musculus protein kinase Chk2 | | BG083482 | Mm.126031 | Signal Transduction |
| 2190 | | (Rad53-pending), mRNA” | | | | |
| 2191 | H3089G12 | Mus musculus zinc transporter like 1 | | BG083497 | Mm.28851 | Energy/Metabolism |
| 2192 | | (Zntl1) mRNA, complete cds | | | | |
| 2193 | H3089H11 | Mouse normal c-myc gene and | | BG083596 | Mm.2444 | Signal Transduction |
| 2194 | | translocated homologue from J558 | | | | |
| | | plasmocytoma cells (cDNA sequence) | | | | |
| 2195 | H3090B01 | “Mus musculus mothers-against-dpp- | | BG083610 | Mm.15185 | Signal Transduction |
| 2196 | | related-1 mRNA, complete cds” | | | | |
| 2197 | H3090B05 | uracil-DNA glycosylase gene, | Mus musculus uracil-DNA glycosylase | BG070697 | Mm.112312 | Energy/Metabolism |
| 2198 | | alternatively spliced | gene, complete cds, alternatively spliced | | | |
| 2199 | H3090C08 | ornithine decarboxylase antizyme | Mus musculus ornithine decarboxylase | BG070710 | Mm.6775 | Energy/Metabolism |
| 2200 | | inhibitor (Oazi), | antizyme inhibitor (Oazi), mRNA | | | |
| 2201 | H3090C10 | N-terminal asparagine amidohydrolase | Mus musculus N-terminal asparagine | BG083629 | Mm.22635 | Energy/Metabolism |
| 2202 | | (Ntan1) gene | amidohydrolase (Ntan1) gene, complete | | | |
| | | | cds | | | |
| 2203 | H3090D01 | “Mus musculus mitogen activated | | BG083632 | Mm.4358 | Signal Transduction |
| 2204 | | protein kinase kinase kinase 12 | | | | |
| | | (Map3k12), mRNA” | | | | |
| 2205 | H3091B08 | partial gene encoding | Mus musculus partial gene encoding | BG070787 | Mm.42205 | Energy/Metabolism |
| 2206 | | deoxyribonuclease I and 5 UTR | deoxyribonuclease I and 5 UTR | | | |
| 2207 | H3091D08 | “Mus musculus guanine nucleotide | | BG083726 | Mm.133949 | Signal Transduction |
| 2208 | | binding protein, alpha 14 (Gna14), | | | | |
| | | mRNA” | | | | |
| 2209 | H3091D11 | tumor necrosis factor (ligand) | Mus musculus tumor necrosis factor | BG070891 | Mm.22585 | Apoptosis |
| 2210 | | superfamily, member 19 (Tnfsf19- | (ligand) superfamily, member 19 | | | |
| | | pending), | (Tnfsf19-pending), mRNA | | | |
| 2211 | H3091E02 | 5(3)-deoxyribonucleotidase (Dnt- | Mus musculus 5(3)- | BG070894 | Mm.41722 | Energy/Metabolism |
| 2212 | | pending), | deoxyribonucleotidase (Dnt-pending), | | | |
| | | | mRNA | | | |
| 2213 | H3091F08 | N-terminal Asn amidase (Ntan1), | Mus musculus N-terminal ASn amidase | BG070912 | Mm.22635 | Energy/Metabolism |
| 2214 | | | (Ntan1), mRNA | | | |
| 2215 | H3091G12 | solute carrier family 1, member 7 | Mus musculus solute carrier family 1, | BG070928 | Mm.1056 | Energy/Metabolism |
| 2216 | | (Slc1a7), | member 7 (Slc1a7), mRNA | | | |
| 2217 | H3091H05 | “Mus musculus H-ras gene, partial cds” | | BG070933 | Mm.6793 | Signal Transduction |
| 2218 | | | | | | |
| 2219 | H3091H07 | deiodinase, iodothyronine type III | Rattus norvegicus deiodinase, | BG070934 | Mm.154427 | Energy/Metabolism |
| 2220 | | (Dio3), | iodothyronine type III (Dio3), mRNA | | | |
| 2221 | H3092E03 | Balb/c cytochrome c oxidase subunit | Mus musculus Balb/c cytochrome c | BG083822 | Mm.43415 | Energy/Metabolism |
| 2222 | | VIaL | oxidase subunit VIaL mRNA, complete | | | |
| | | | cds | | | |
| 2223 | H3092E04 | caspase 8 associated protein 2 | Mus musculus caspase 8 associated | BG070820 | Mm.22279 | Apoptosis |
| 2224 | | (Casp8ap2), | protein 2 (Casp8ap2), mRNA | | | |
| 2225 | H3092G01 | “Mus musculus p38delta MAP kinase | | BG083840 | Mm.27970 | Signal Transduction |
| 2226 | | mRNA, complete cds” | | | | |
| 2227 | H3092H01 | vacuolar adenosine triphosphatase | Mus musculus vacuolar adenosine | BG070846 | Mm.29771 | Energy/Metabolism |
| 2228 | | subunit A gene | triphosphatase subunit A gene, complete | | | |
| | | | cds | | | |
| 2229 | H3092H09 | “Mus musculus mitogen-activated | | BG083857 | | Signal Transduction |
| 2230 | | protein kinase 8 interacting protein 2 | | | | |
| | | (Mapk8ip2), mRNA” | | | | |
| 2231 | H3092H10 | glycogenin 1 (Gyg1), | Mus musculus glycogenin 1 (Gyg1), | BG070855 | Mm.6375 | Energy/Metabolism |
| 2232 | | | mRNA | | | |
| 2233 | H3093B07 | chloride channel 5 (Clcn5), | Mus musculus chloride channel 5 | BG083875 | Mm.104172 | Energy/Metabolism |
| 2234 | | | (Clcn5), mRNA | | | |
| 2235 | H3093D09 | Tom22 | Homo sapiens mRNA for Tom22, | BG083900 | Mm.9326 | Energy/Metabolism |
| 2236 | | | complete cds | | | |
| 2237 | H3093F02 | uridine monophosphate kinase (UMPK), | Homo sapiens uridine monophosphate | BG083915 | | Energy/Metabolism |
| 2238 | | | kinase (UMPK), mRNA | | | |
| 2239 | H3093G07 | “Homo sapiens Putative prostate cancer | | BG071015 | Mm.24156 | Signal Transduction |
| 2240 | | tumor suppressor (N33), mRNA” | | | | |
| 2241 | H3093G08 | GST-5 = glutathione S-transferase-sperm | GST-5 = glutathione S-transferase-sperm | BG071016 | Mm.11346 | Energy/Metabolism |
| 2242 | | antigen MSAg-5 fusion protein {3 | antigen MSAg-5 fusion protein {3 | | | |
| | | region} [mice, testis, Recombinant | region} [mice, testis, mRNA | | | |
| | | Partial, 860 nt] | Recombinant Partial, 860 nt] | | | |
| 2243 | H3093H01 | mannosyl (alpha-1,6-)-glycoprotein | Homo sapiens mannosyl (alpha-1,6-)- | BG084016 | Mm.24293 | Energy/Metabolism |
| 2244 | | beta-1,2-N- | glycoprotein beta-1,2-N- | | | |
| | | acetylglucosaminyltransferase | acetylglucosaminyltransferase | | | |
| | | (MGAT2), | (MGAT2), mRNA | | | |
| 2245 | H3094C01 | Mus musculus gene for prostacyclin | | BG084049 | | Energy/Metabolism |
| 2246 | | synthase, 5-flanking region and partial | | | | |
| | | cds | | | | |
| 2247 | H3094D01 | Mus musculus cytochrome P450 side | | BG071067 | Mm.108678 | Energy/Metabolism |
| 2248 | | chain cleavage enzyme 11a1 | | | | |
| | | (Cyp11a1), mRNA | | | | |
| 2249 | H3094D02 | “Mus musculus GNB1 gene for G | | BG071068 | Mm.2344 | Signal Transduction |
| 2250 | | protein beta1 subunit, exon 12 and | | | | |
| | | complete cds” | | | | |
| 2251 | H3094D04 | Mus musculus GLUT4 vesicle protein | | BG071070 | Mm.29010 | Energy/Metabolism |
| 2252 | | mRNA, partial cds | | | | |
| 2253 | H3094E12 | | | | Mm.26092 | Energy/Metabolism |
| 2254 | | | | | | |
| 2255 | H3094G04 | Homo sapiens cDNA FLJ12225 fis, | | BG083967 | Mm.12983 | Energy/Metabolism |
| 2256 | | clone MAMMA1001139, weakly | | | | |
| | | similar to SRE-2 PROTEIN | | | | |
| 2257 | H3094G10 | Homo sapiens mitogen-activated protein | | | Mm.29588 | |
| 2258 | | kinase kinase kinase kinase 3 | | | | |
| | | (MAP4K3), mRNA | | | | |
| 2259 | H3094H06 | Mus musculus Bcl2-interacting killer- | | BG071119 | Mm.17912 | Apoptosis |
| 2260 | | like (Biklk), mRNA | | | | |
| 2261 | H3095D11 | Mus musculus mitogen activated protein | | | | |
| 2262 | | kinase kinase kinase 12 (Map3k12), | | | | |
| | | mRNA | | | | |
| 2263 | H3095E06 | Mus musculus glutathione S-transferase | | BG084006 | Mm.282 | Energy/Metabolism |
| | | like (Gsttl-pending), mRNA | | | | |
| 2264 | H3095F10 | Homo sapiens calcineurin binding | | BG071186 | Mm.154496 | |
| 2265 | | protein 1 (KIAA0330), mRNA | | | | |
| 2266 | H3095G05 | Rattus norvegicus Fucosidase, alpha-L- | | BG084074 | Mm.21580 | Energy/Metabolism |
| 2267 | | 1, tissue (Fuca), mRNA | | | | |
| 2268 | H3095H12 | Mus musculus carbonic anhydrase 4 | | BG071207 | Mm.1641 | Energy/Metabolism |
| | | (Car4), mRNA | | | | |
| 2269 | H3096A03 | cytochrome c oxidase, subunit IV | Mus musculus cytochrome c oxidase, | BG084085 | Mm.2136 | Energy/Metabolism |
| 2270 | | (Cox4), | subunit IV (Cox4), mRNA | | | |
| 2271 | H3096D01 | “Mus musculus protein phosphatase 4, | | BG071232 | Mm.28082 | Signal Transduction |
| 2272 | | catalytic subunit (Ppp4c), mRNA” | | | | |
| 2273 | H3096E12 | clone TSIP1 p53-induced apoptosis | Mus musculus clone TSIP1 p53- | BG084126 | Mm.142872 | Apoptosis |
| 2274 | | differentially expressed sequence | induced apoptosis differentially | | | |
| | | | expressed mRNA sequence | | | |
| 2275 | H3096F11 | HNK-1 sulfotransferase (HNK-1ST), | Homo sapiens HNK-1 sulfotransferase | BG084134 | Mm.26817 | Energy/Metabolism |
| 2276 | | | (HNK-1ST), mRNA | | | |
| 2277 | H3097A02 | Homo sapiens leucine aminopeptidase | | BG084150 | Mm.34832 | Energy/Metabolism |
| 2278 | | (LOC51056), mRNA | | | | |
| 2279 | H3097A03 | Mus musculus cytochrome c oxidase, | | BG084151 | Mm.2136 | Energy/Metabolism |
| 2280 | | subunit IV (Cox4), mRNA | | | | |
| 2281 | H3097A05 | Homo sapiens sulfite oxidase (SUOX), | | BG084153 | Mm.23352 | Energy/Metabolism |
| 2282 | | mRNA | | | | |
| 2283 | H3097B01 | Mus musculus branched chain | | BG084158 | Mm.4606 | Energy/Metabolism |
| 2284 | | aminotransferase 1, cytosolic (Bcat1), | | | | |
| | | mRNA | | | | |
| 2285 | H3097B03 | Mus musculus solute carrier family 11 | | BG084160 | Mm.36460 | Energy/Metabolism |
| 2286 | | (proton-coupled divalent metal ion | | | | |
| | | transporters), member 2 (Slc11a2), | | | | |
| | | mRNA | | | | |
| 2287 | H3097C12 | | | | Mm.22409 | Energy/Metabolism |
| 2288 | | | | | | |
| 2289 | H3097F02 | Mus musculus sialyltransferase 8 | | BG084201 | Mm.4954 | Energy/Metabolism |
| 2290 | | (alpha-2, 8-sialytransferase) B (Siat8b), | | | | |
| | | mRNA | | | | |
| 2291 | H3097F06 | Homo sapiens FACL5 for fatty acid | | BG084205 | Mm.30263 | Energy/Metabolism |
| 2292 | | coenzyme A ligase 5 (LOC51703), | | | | |
| | | mRNA | | | | |
| 2293 | H3097G07 | “Mus musculus retinoblastoma-binding | | BG084218 | Mm.24216 | Signal Transduction |
| 2294 | | protein 9 (Rbbp9), mRNA” | | | | |
| 2295 | H3097H08 | “Mus musculus retinoblastoma binding | | BG084231 | Mm.12145 | Signal Transduction |
| 2296 | | protein 4 (Rbbp4), mRNA” | | | | |
| 2297 | H3098A08 | B. taurus PSST subunit of the NADH: | B. taurus mRNA for PSST subunit of | BG084240 | Mm.28712 | Energy/Metabolism |
| 2298 | | ubiquinone oxidoreductase complex | the NADH: ubiquinone oxidoreductase | | | |
| | | | complex | | | |
| 2299 | H3098D02 | “Mus musculus protein tyrosine | | BG084265 | Mm.2817 | Signal Transduction |
| 2300 | | phosphatase, receptor-type, F interacting | | | | |
| | | protein, binding protein 2 (Ppfibp2), | | | | |
| | | mRNA” | | | | |
| 2301 | H3098D12 | “Mus musculus mitogen activated | | AU041108 | Mm.1059 | Signal Transduction |
| 2302 | | protein kinase kinase 1 (Map2k1), | | | | |
| | | mRNA” | | | | |
| 2303 | H3098E11 | “Mus musculus chaperonin subunit 2 | | BG084277 | Mm.40849 | Heat Shock/Stress |
| 2304 | | (beta) (Cct2), mRNA” | | | | |
| 2305 | H3098H02 | carbonyl reductase (LOC51181), | Homo sapiens carbonyl reductase | BG084296 | | Energy/Metabolism |
| 2306 | | | (LOC51181), mRNA | | | |
| 2307 | H3099A05 | 5-nucleotidase (purine), cytosolic type B | Homo sapiens 5-nucleotidase (purine), | BG084308 | Mm.29601 | Energy/Metabolism |
| 2308 | | (NT5B), | cytosolic type B (NT5B), mRNA | | | |
| 2309 | H3099C01 | solute carrier family 34 (sodium | Mus musculus solute carrier family 34 | BG084323 | | Energy/Metabolism |
| 2310 | | phosphate), member 2 (Slc34a2), | (sodium phosphate), member 2 | | | |
| | | | (Slc34a2), mRNA | | | |
| 2311 | H3099D04 | cytochrome c oxidase Vb subunit gene | Mouse cytochrome c oxidase Vb | BG071472 | Mm.16769 | Energy/Metabolism |
| 2312 | | | subunit gene, complete cds | | | |
| 2313 | H3099E08 | cDNA FLJ13488 fis, clone | Homo sapiens cDNA FLJ13488 fis, | BG084341 | Mm.22363 | |
| 2314 | | PLACE1003915, weakly similar to | clone PLACE1003915, weakly similar | | | |
| | | PROBABLE ARGINYL-TRNA | to PROBABLE ARGINYL-TRNA | | | |
| | | SYNTHETASE, CYTOPLASMIC (EC | SYNTHETASE, CYTOPLASMIC (EC | | | |
| | | 6.1.1.19) | 6.1.1.19) | | | |
| 2315 | H3100C01 | rod cGMP phosphodiesterase delta | Mus musculus rod cGMP | BG084383 | Mm.12925 | Energy/Metabolism |
| 2316 | | subunit (Pde6d) gene | phosphodiesterase delta subunit (Pde6d) | | | |
| | | | gene, complete cds | | | |
| 2317 | H3100C10 | potassium intermediate/small | Homo sapiens potassium | BG084391 | Mm.17734 | Energy/Metabolism |
| 2318 | | conductance calcium-activated channel, | intermediate/small conductance | | | |
| | | subfamily N, member 2 (KCNN2), | calcium-activated channel, subfamily | | | |
| | | | N, member 2 (KCNN2), mRNA | | | |
| 2319 | H3100E04 | inhibitor of apoptosis protein 1 | Mus musculus inhibitor of apoptosis | BG084405 | Mm.2026 | Apoptosis |
| 2320 | | | protein 1 mRNA, complete cds | | | |
| 2321 | H3101A08 | ribosomal protein L23 (Rpl23), | Mus musculus ribosomal protein L23 | BG084450 | Mm.12144 | Energy/Metabolism |
| 2322 | | | (Rpl23), mRNA | | | |
| 2323 | H3101C10 | glyceraldehyde-3-phosphate | Mus musculus glyceraldehyde-3- | BG071626 | Mm.5289 | Energy/Metabolism |
| 2324 | | dehydrogenase (Gapd), | phosphate dehydrogenase (Gapd), | | | |
| | | | mRNA | | | |
| 2325 | H3101D05 | phosphatidylethanolamine N- | Mus musculus | BG071633 | Mm.2731 | Energy/Metabolism |
| 2326 | | methyltransferase (Pemt), | phosphatidylethanolamine N- | | | |
| | | | methyltransferase (Pemt), mRNA | | | |
| 2327 | H3101E05 | solute carrier family 34 (sodium | Mus musculus solute carrier family 34 | BG071644 | Mm.3786 | Energy/Metabolism |
| 2328 | | phosphate), member 2 (Slc34a2), | (sodium phosphate), member 2 | | | |
| | | | (Slc34a2), mRNA | | | |
| 2329 | H3101G05 | “Mus musculus DNA J protein (Dnaj3), | | AU044106 | Mm.29186 | Heat Shock/Stress |
| | | mRNA” | | | | |
| 2330 | H3101H02 | “Rattus norvegicus mytonic dystrophy | | BG071671 | Mm.38330 | Signal Transduction |
| 2331 | | kinase-related Cdc42-binding kinase | | | | |
| | | (MRCK) mRNA, complete cds” | | | | |
| 2332 | H3102A07 | phosphatidylserine synthase 1 (Ptdss1), | Mus musculus phosphatidylserine | BG071685 | Mm.9440 | Energy/Metabolism |
| 2333 | | | synthase 1 (Ptdss1), mRNA | | | |
| 2334 | H3102C06 | choline transporter (CHOT1), | Rattus norvegicus choline transporter | BG071707 | Mm.28056 | Energy/Metabolism |
| 2335 | | | (CHOT1), mRNA | | | |
| 2336 | H3102D02 | apoptotic chromatin condensation | Mus musculus apoptotic chromatin | BG071714 | Mm.30236 | Apoptosis |
| 2337 | | inducer in the nucleus (Acinus- | condensation inducer in the nucleus | | | |
| | | pending), | (Acinus-pending), mRNA | | | |
| 2338 | H3102D09 | “Mus musculus retinoblastoma binding | | BG084566 | Mm.1603 | Signal Transduction |
| 2339 | | protein 7 (Rbbp7), mRNA” | | | | |
| 2340 | H3102E01 | potassium channel modulatory factor | Mus musculus potassium channel | BG071725 | Mm.29194 | Energy/Metabolism |
| 2341 | | DEBT-91 (Debt91), | modulatory factor DEBT-91 (Debt91), | | | |
| | | | mRNA | | | |
| 2342 | H3102F08 | N-acylsphingosine amidohydrolase 1 | Mus musculus N-acylsphingosine | BG071742 | Mm.22547 | Energy/Metabolism |
| 2343 | | (Asah1), | amidohydrolase 1 (Asah1), mRNA | | | |
| 2344 | H3102G07 | “Mus musculus protein tyrosine | | BG071749 | Mm.147428 | Signal Transduction |
| 2345 | | phosphatase, non-receptor type 11 | | | | |
| | | (Ptpn11), mRNA” | | | | |
| 2346 | H3102H03 | isoleucine-tRNA synthetase (IARS), | Homo sapiens isoleucine-tRNA | BG084601 | Mm.21118 | Energy/Metabolism |
| 2347 | | | synthetase (IARS), mRNA | | | |
| 2348 | H3102H07 | 2,3-bisphosphoglycerate mutase | Mus musculus 2,3-bisphosphoglycerate | BG084605 | Mm.22706 | Energy/Metabolism |
| 2349 | | (Bpgm), | mutase (Bpgm), mRNA | | | |
| 2350 | H3102H09 | ribonuclease H1 (Rnaseh1), | Mus musculus ribonuclease H1 | BG071762 | Mm.10152 | Energy/Metabolism |
| 2351 | | | (Rnaseh1), mRNA | | | |
| 2352 | H3103A05 | “Mus musculus phospholipase A2, | | BG084614 | Mm.4186 | Signal Transduction |
| 2353 | | group 4 (Pla2g4), mRNA” | | | | |
| 2354 | H3103B07 | Mus musculus BCL2/adenovirus E1B | | BG084628 | Mm.142818 | Apoptosis |
| 2355 | | 19 kDa-interacting protein 3-like | | | | |
| | | (Bnip31), mRNA | | | | |
| 2356 | H3103D01 | “Mus musculus protein phosphatase 1, | | BG071790 | Mm.7793 | Signal Transduction |
| 2357 | | catalytic subunit, gamma isoform | | | | |
| | | (Ppp1cc), mRNA” | | | | |
| 2358 | H3103D11 | “Mus musculus regulator of G-protein | | BG071811 | Mm.44606 | Signal Transduction |
| 2359 | | signaling 17 (Rgs17), mRNA” | | | | |
| 2360 | H3103E12 | Mus musculus Bcl2-like 10 (Bcl2l10), | | BG071824 | Mm.25988 | Apoptosis |
| 2361 | | mRNA | | | | |
| 2362 | H3103F06 | “Mus musculus small GTPase (Rab11a) | | BG071829 | Mm.1387 | Signal Transduction |
| 2363 | | gene, complete cds” | | | | |
| 2364 | H3104A11 | Mus musculus thioredoxin-like (32 kD) | | BG071869 | Mm.19169 | Energy/Metabolism |
| 2365 | | (Txnl), mRNA | | | | |
| 2366 | H3104D01 | Mouse mRNA for beta-1,4- | | BG071892 | Mm.15622 | Energy/Metabolism |
| 2367 | | galactosyltransferase | | | | |
| 2368 | H3104E06 | Mus musculus ATP-binding cassette | | BG071908 | Mm.41002 | Energy/Metabolism |
| 2369 | | protein (Abcc1b) mRNA, partial cds | | | | |
| 2370 | H3105A09 | Pseudomonas aeruginosa PA01, section | Pseudomonas aeruginosa PA01, section | BG071952 | | Energy/Metabolism |
| 2371 | | 341 of 529 of the genome | 341 of 529 of the complete genome | | | |
| 2372 | H3105A10 | cDNA FLJ12989 fis, clone | Homo sapiens cDNA FLJ12989 fis, | BG084872 | Mm.154589 | Energy/Metabolism |
| 2373 | | NT2RP3000085, moderately similar to | clone NT2RP3000085, moderately | | | |
| | | ACETYL-/PROPIONYL-COENZYME | similar to ACETYL-/PROPIONYL- | | | |
| | | A CARBOXYLASE ALPHA CHAIN | COENZYME A CARBOXYLASE | | | |
| | | [CONTAINS: BIOTIN | ALPHA CHAIN [CONTAINS: | | | |
| | | CARBOXYLASE (EC 6.3.4.14); | BIOTIN CARBOXYLASE (EC | | | |
| | | BIOTIN CARBOXYL CARRIER | 6.3.4.14); BIOTIN CARBOXYL | | | |
| | | | CARRIER | | | |
| 2374 | H3105B07 | “Mus musculus Cctz-2 gene for | | BG084881 | Mm.29622 | Heat Shock/Stress |
| 2375 | | chaperonin containing TCP-1 zeta-2 | | | | |
| | | subunit, exon 1, 2, 3” | | | | |
| 2376 | H3105C03 | CGI-30 protein (LOC51611), | Homo sapiens CGI-30 protein | BG084888 | Mm.5915 | Energy/Metabolism |
| 2377 | | | (LOC51611), mRNA | | | |
| 2378 | H3105C04 | natural killer cell BY55 precursor | Mus musculus natural killer cell BY55 | BG084889 | Mm.11526 | Apoptosis |
| 2379 | | (By55-pending), | precursor (By55-pending), mRNA | | | |
| 2380 | H3105C10 | “Mus musculus mRNA for LIMK2b, | | BG071976 | Mm.42927 | Signal Transduction |
| 2381 | | complete cds” | | | | |
| 2382 | H3105D09 | masc apoptosis-associated speck-like | Mus musculus masc mRNA for | BG071986 | Mm.24163 | Apoptosis |
| 2383 | | protein containing CARD | apoptosis-associated speck-like protein | | | |
| | | | containing CARD, complete cds | | | |
| 2384 | H3105E08 | tyrosine 3-monooxygenase/tryptophan | Mus musculus tyrosine 3- | BG084914 | Mm.14722 | Energy/Metabolism |
| 2385 | | 5-monooxygenase activation protein, | monooxygenase/tryptophan 5- | | | |
| | | theta polypeptide (Ywhaq), | monooxygenase activation protein, | | | |
| | | | theta polypeptide (Ywhaq), mRNA | | | |
| 2386 | H3105G04 | “Mus musculus mitogen-activated | | BG084932 | Mm.987 | Signal Transduction |
| 2387 | | protein kinase kinase kinase kinase 4 | | | | |
| | | (Map4k4), mRNA” | | | | |
| 2388 | H3105G10 | pyrroline 5-carboxylate reductase isom | Homo sapiens pyrroline 5-carboxylate | BG072021 | Mm.29379 | Energy/Metabolism |
| 2389 | | (P5CR2), | reductase isoform (P5CR2), mRNA | | | |
| 2390 | H3107D11 | H3107D11 | | | | Energy/Metabolism |
| 2391 | | | | | | |
| 2392 | H3107E03 | H3107E03 | | | | Energy/Metabolism |
| 2393 | | | | | | |
| 2394 | H3107G10 | alpha-N-acetylglucosaminidase | Mus musculus alpha-N- | BG072192 | Mm.6142 | Energy/Metabolism |
| 2395 | | (Sanfilippo disease IIIB) (Naglu), | acetylglucosaminidase (Sanfilippo | | | |
| | | | disease IIIB) (Naglu), mRNA | | | |
| 2396 | H3107G12 | carnitine octanoyltransferase (COT), | Homo sapiens carnitine | BG085029 | Mm.28197 | Energy/Metabolism |
| 2397 | | | octanoyltransferase (COT), mRNA | | | |
| 2398 | H3108C03 | 3-5 exonuclease TREX1 | Mus musculus 3-5 exonuclease TREX1 | BG072232 | Mm.17632 | Energy/Metabolism |
| 2399 | | | mRNA, complete cds | | | |
| 2400 | H3108E02 | “Homo sapiens mitogen-activated | | BG072253 | Mm.18856 | Signal Transduction |
| 2401 | | protein kinase 6 (MAPK6), mRNA” | | | | |
| 2402 | H3108E05 | “Mus musculus RAS, dexamethasone- | | BG072256 | Mm.3903 | Signal Transduction |
| 2403 | | induced 1 (Rasd1), mRNA” | | | | |
| 2404 | H3108F08 | TF-1 cell apoptosis related protein-15 | Mus musculus TF-1 cell apoptosis | BG085103 | Mm.28441 | Apoptosis |
| 2405 | | (Tfar15), | related protein-15 (Tfar15), mRNA | | | |
| 2406 | H3108H04 | “Mus musculus adenylyl cyclase type 9 | | BG072288 | Mm.4294 | Signal Transduction |
| 2407 | | mRNA, complete cds” | | | | |
| 2408 | H3108H12 | laminin B1 | Mouse laminin B1 mRNA, complete | BG085129 | Mm.148395 | Apoptosis |
| 2409 | | | cds | | | |
| 2410 | H3109A04 | “Mus musculus receptor (calcitonin) | | BG072299 | Mm.1574 | Signal Transduction |
| 2411 | | activity modifying protein 2 (Ramp2), | | | | |
| | | mRNA” | | | | |
| 2412 | H3109F07 | ATPase, Ca++ transporting, cardiac | Mus musculus ATPase, Ca++ | BG085195 | Mm.42255 | Energy/Metabolism |
| 2413 | | muscle, slow twitch 2 (Atp2a2), | transporting, cardiac muscle, slow | | | |
| | | | twitch 2 (Atp2a2), mRNA | | | |
| 2414 | H3110B08 | tyrosine 3-monooxygenase/tryptophan | Mus musculus tyrosine 3- | BG085234 | Mm.14722 | Energy/Metabolism |
| 2415 | | 5-monooxygenase activation protein, | monooxygenase/tryptophan 5- | | | |
| | | theta polypeptide (Ywhaq), | monooxygenase activation protein, | | | |
| | | | theta polypeptide (Ywhaq), mRNA | | | |
| 2416 | H3110B12 | “Homo sapiens casein kinase I alpha | | BG072410 | Mm.43737 | Signal Transduction |
| 2417 | | isoform (CSNK1A1) mRNA, complete | | | | |
| | | cds” | | | | |
| 2418 | H3110F10 | epoxide hydrolase 1, microsomal | Mus musculus epoxide hydrolase 1, | BG072453 | Mm.9075 | Energy/Metabolism |
| 2419 | | (Ephx1), | microsomal (Ephx1), mRNA | | | |
| 2420 | H3110H11 | “Mouse brain calmodulin-dependent | | BG072475 | Mm.293 | Signal Transduction |
| 2421 | | phosphatase (calcineurin) catalytic | | | | |
| | | subunit mRNA, 3′ end” | | | | |
| 2422 | H3111A02 | brain cDNA, clone MNCb-1429, similar | Mus musculus brain cDNA, clone | BG085276 | Mm.30215 | Energy/Metabolism |
| 2423 | | to peroxiredoxin V (PrxV) gene | MNCb-1429, similar to Mus musculus | | | |
| | | | peroxiredoxin V (PrxV) gene | | | |
| 2424 | H3111A08 | “Mus musculus signal transducer and | | BG085280 | | Signal Transduction |
| 2425 | | transcription activator 5a (Stat5a) gene, | | | | |
| | | partial cds” | | | | |
| 2426 | H3111F09 | Rat Y-b3 glutathione-S-transferase | Rat Y-b3 glutathione-S-transferase | BG072517 | Mm.29640 | Energy/Metabolism |
| 2427 | | | mRNA, complete cds | | | |
| 2428 | H3111G06 | arginase type II (Arg2), | Mus musculus arginase type II (Arg2), | BG085317 | Mm.3506 | Energy/Metabolism |
| 2429 | | | mRNA | | | |
| 2430 | H3111G12 | zinc transporter like 2 (Zntl2) | Mus musculus zinc transporter like 2 | BG085322 | Mm.28490 | Energy/Metabolism |
| 2431 | | | (Zntl2) mRNA, complete cds | | | |
| 2432 | H3112A04 | Mus musculus carnitine | | BG085333 | Mm.29499 | Matrix/Structural |
| 2433 | | palmitoyltransferase 2 (Cpt2), mRNA | | | | Proteins |
| 2434 | H3112B05 | “Homo sapiens calcium-regulated heat- | | BG072550 | Mm.33981 | Heat Shock/Stress |
| 2345 | | stable protein (24 kD) (CRHSP-24), | | | | |
| | | mRNA” | | | | |
| 2436 | H3112B07 | Rat mRNA for 3-oxoacyl-CoA thiolase | | BG085346 | Mm.142498 | Energy/Metabolism |
| 2437 | | | | | | |
| 2438 | H3112F06 | “Mus musculus Cctb gene for | | BG085384 | Mm.3670 | Heat Shock/Stress |
| 2439 | | chaperonin containing TCP-1 beta | | | | |
| | | subunit, complete cds” | | | | |
| 2440 | H3112G09 | Mus musculus ATPase, H+ | | BG085399 | Mm.1081 | Energy/Metabolism |
| 2441 | | transporting, lysosomal (vacuolar | | | | |
| | | proton pump), 42 kDa (Atp6d), mRNA | | | | |
| 2442 | H3113B07 | 13 kDa differentiation-associated protein | Homo sapiens 13 kDa differentiation- | BG085428 | Mm.27886 | Energy/Metabolism |
| 2443 | | (LOC55967), | associated protein (LOC55967), mRNA | | | |
| 2444 | H3113B08 | F1F0ATP synthase complex E subunit | Mus musculus F1F0ATP synthase | | Mm.19370 | Energy/Metabolism |
| 2445 | | (Atp5k) gene | complex E subunit (Atp5k) gene, | | | |
| | | | complete cds | | | |
| 2446 | H3113E03 | “Mus musculus MAP kinase-interacting | | BG085457 | Mm.6797 | Signal Transduction |
| 2447 | | serine/threonine kinase 2 (Mknk2), | | | | |
| | | mRNA” | | | | |
| 2448 | H3113F04 | “Mus musculus kappaB-Ras1 mRNA, | | BG072675 | Mm.25648 | Signal Transduction |
| 2449 | | complete cds” | | | | |
| 2450 | H3113F06 | ribonuclease/angiogenin inhibitor | Homo sapiens ribonuclease/angiogenin | BG085471 | Mm.6586 | Energy/Metabolism |
| 2451 | | (RNH), | inhibitor (RNH), mRNA | | | |
| 2452 | H3113G07 | “Homo sapiens phospholipase C, | | BG085484 | Mm.22370 | Signal Transduction |
| 2453 | | gamma 2 (phosphatidylinositol- | | | | |
| | | specific) (PLCG2), mRNA” | | | | |
| 2454 | H3113G08 | ornithine decarboxylase antizyme 3 | Mus musculus ornithine decarboxylase | BG085485 | Mm.154432 | Energy/Metabolism |
| 2455 | | (Oaz3), | antizyme 3 (Oaz3), mRNA | | | |
| 2456 | H3113H12 | “Mus musculus manic fringe homolog | | BG072704 | Mm.517 | Signal Transduction |
| 2457 | | (Drosophila)(Mfng), mRNA” | | | | |
| 2458 | H3114A05 | glutathione peroxidase 4 (Gpx4), | Mus musculus glutathione peroxidase 4 | BG072706 | Mm.2400 | Energy/Metabolism |
| 2459 | | | (Gpx4), mRNA | | | |
| 2460 | H3114A06 | spermidine/spermine N1-acetyl | Mus musculus spermidine/spermine | BG085499 | Mm.2734 | Energy/Metabolism |
| 2461 | | transferase (Sat), | N1-acetyl transferase (Sat), mRNA | | | |
| 2462 | H3114C12 | cytosolic class 3 aldehyde | Mus musculus cytosolic class 3 | BG085522 | Mm.14798 | Energy/Metabolism |
| 2463 | | dehydrogenase (Adh4) gene, 5 flanking | aldehyde dehydrogenase (Adh4) gene, 5 | | | |
| | | region sequence | flanking region sequence | | | |
| 2464 | H3114D10 | M. musculus RPS3a gene | M. musculus RPS3a gene | BG072742 | Mm.6957 | Apoptosis |
| 2465 | | | | | | |
| 2466 | H3114F11 | Mus musculus interferon gamma | | BG085554 | Mm.153463 | Signal Transduction |
| 2467 | | receptor 2 (Ifngr2), mRNA | | | | |
| 2468 | H3114G12 | “Mus musculus copper chaperone for | | BG072776 | Mm.21414 | Heat Shock/Stress |
| 2469 | | superoxide dismutase (Ccsd) mRNA, | | | | |
| | | complete cds” | | | | |
| 2470 | H3114H06 | PIG-M mannosyltransferase | Rattus norvegicus PIG-M mRNA for | BG085572 | Mm.26612 | Energy/Metabolism |
| 2471 | | | mannosyltransferase, complete cds | | | |
| 2472 | H3115A05 | “Mus musculus phospholipase C, delta | | BG085579 | Mm.23963 | Signal Transduction |
| | | (Plcd), mRNA” | | | | |
| 2473 | H3115B07 | Mus musculus S100A9 gene for | | BG072801 | Mm.2128 | Signal Transduction |
| 2474 | | S100A9 protein exons 1-3 | | | | |
| 2475 | H3115C02 | clone UWGC: mbac82 from 14D1-D2 | Mus musculus clone UWGC: mbac82 | BG072808 | Mm.353 | Energy/Metabolism |
| 2476 | | (T-Cell Receptor Alpha Locus), | from 14D1-D2 (T-Cell Receptor Alpha | | | |
| | | sequence | Locus), complete sequence | | | |
| 2477 | H3115C11 | “Mus musculus protein phosphatase 2A | | BG072817 | Mm.3785 | Signal Transduction |
| 2478 | | B′alpha3 regulatory subunit mRNA, | | | | |
| | | partial cds” | | | | |
| 2479 | H3115D08 | F1F0-ATP synthase, g subunit | Mus musculus mRNA for F1F0-ATP | BG072826 | Mm.14663 | Energy/Metabolism |
| 2480 | | | synthase, g subunit | | | |
| 2481 | H3115H06 | ribosomal protein L29 | | | Mm.2235 | Energy/Metabolism |
| 2482 | | | | | | |
| 2483 | H3115H10 | ATP synthase gamma-subunit precursor | Mus musculus mRNA for ATP synthase | BG072870 | Mm.12677 | Energy/Metabolism |
| 2484 | | | gamma-subunit precursor, complete cds | | | |
| 2485 | H3116D11 | cytochrome c oxidase, subunit VIIa 3 | Mus musculus cytochrome c oxidase, | BG072912 | Mm.2151 | Energy/Metabolism |
| 2486 | | (Cox7a3), | subunit VIIa 3 (Cox7a3), mRNA | | | |
| 2487 | H3116E02 | “Mus musculus adenylate cyclase | | BG085699 | Mm.44245 | Signal Transduction |
| 2488 | | activating polypeptide 1 receptor 1 | | | | |
| | | (Adcyap1r1), mRNA” | | | | |
| 2489 | H3116G12 | H3116G12 | | | | Energy/Metabolism |
| 2490 | | | | | | |
| 2491 | H3117A12 | kinesin-related mitotic motor protein | Mus musculus mRNA for kinesin- | | Mm.42203 | |
| 2492 | | | related mitotic motor protein | | | |
| 2493 | H3117C04 | “Homo sapiens MEBP-1 mRNA for | | BG072981 | Mm.6803 | Heat Shock/Stress |
| 2494 | | MAPK-ERK binding protein-1, | | | | |
| | | complete cds” | | | | |
| 2495 | H3117G06 | Rat glycogen phosphorylase brain | Rat glycogen phosphorylase brain | BG073025 | Mm.30072 | Energy/Metabolism |
| 2496 | | isozyme, 5 end of cds | isozyme mRNA, 5 end of cds | | | |
| 2497 | H3118E12 | apoptosis inhibitor bcl-x (bcl-x) gene, | Mus musculus apoptosis inhibitor bcl-x | AW548292 | Mm.148197 | Apoptosis |
| | | exon 3 and cds | (bcl-x) gene, exon 3 and complete cds | | | |
| 2498 | H3118H09 | mastocytoma N-deacetylase/N- | Mus musculus mastocytoma N- | BG085858 | Mm.4084 | Energy/Metabolism |
| 2499 | | sulfotransferase (Mndns), | deacetylase/N-sulfotransferase (Mndns), | | | |
| | | | mRNA | | | |
| 2500 | H3119A04 | H+ ATP synthase subunit c | Mus musculus H+ ATP synthase | BG085863 | Mm.258 | Energy/Metabolism |
| 2501 | | | subunit c mRNA, complete cds | | | |
| 2502 | H3119B04 | | | | | Heat Shock/Stress |
| 2503 | | | | | | |
| 2504 | H3119B06 | Na, K-ATPase beta-3 subunit (Atp1b3) | Mus musculus Na, K-ATPase beta-3 | BG073136 | Mm.424 | Energy/Metabolism |
| 2505 | | gene, exon 7 and cds | subunit (Atp1b3) gene, exon 7 and | | | |
| | | | complete cds | | | |
| 2506 | H3119B09 | cytochrome b-561 (Cyb561), | Mus musculus cytochrome b-561 | BG085878 | Mm.18942 | Energy/Metabolism |
| 2507 | | | (Cyb561), mRNA | | | |
| 2508 | H3119G03 | “Mus musculus protein tyrosine | | BG073186 | Mm.28909 | Signal Transduction |
| 2509 | | phosphatase 4a1 (Ptp4a1), mRNA” | | | | |
| 2510 | H3119G08 | glutathione S-transferase, alpha 4 | Mus musculus glutathione S-transferase, | BG073190 | Mm.2662 | Energy/Metabolism |
| 2511 | | (Gsta4), | alpha 4 (Gsta4), mRNA | | | |
| 2512 | H3119G12 | cDNA DKFZp564A126 (from clone | Homo sapiens mRNA; cDNA | BG085933 | Mm.22710 | Energy/Metabolism |
| 2513 | | DKFZp564A126); partial cds | DKFZp564A126 (from clone | | | |
| | | | DKFZp564A126); partial cds | | | |
| 2514 | H3119H03 | Mus musculus FVB/N collagen pro- | | BG073196 | Mm.22621 | Matrix/Structural |
| 2515 | | alpha-1 type I chain mRNA, complete | | | | Proteins |
| | | cds | | | | |
| 2516 | H3119H04 | fatty-acid-Coenzyme A ligase, long- | Homo sapiens fatty-acid-Coenzyme A | BG073197 | Mm.27944 | Energy/Metabolism |
| 2517 | | chain 3 (FACL3), | ligase, long-chain 3 (FACL3), mRNA | | | |
| 2518 | H3119H06 | “Homo sapiens casein kinase 1, gamma | | BG085938 | Mm.29873 | Signal Transduction |
| 2519 | | 2 (CSNK1G2), mRNA” | | | | |
| 2520 | H3120A10 | isocitrate dehydrogenase | Mus musculus isocitrate dehydrogenase | BG085953 | Mm.2966 | Energy/Metabolism |
| 2521 | | | mRNA, complete cds | | | |
| 2522 | H3120D01 | “Mus musculus MEK kinase 3, mRNA, | | BG085978 | Mm.27041 | Signal Transduction |
| 2523 | | partial cds” | | | | |
| 2524 | H3120F08 | geranylgeranyl diphosphate synthase 1 | Mus musculus geranylgeranyl | BG086008 | Mm.4076 | Energy/Metabolism |
| 2525 | | (Ggps1), | diphosphate synthase 1 (Ggps1), | | | |
| | | | mRNA | | | |
| 2526 | H3120H05 | full length insert cDNA clone ZC24D06 | Homo sapiens full length insert cDNA | BG086026 | | Energy/Metabolism |
| 2527 | | | clone ZC24D06 | | | |
| 2528 | H3121A04 | protein phosphatase type-1 catalytic | Homo sapiens protein phosphatase | BG086037 | Mm.4572 | Energy/Metabolism |
| 2529 | | subunit delta isom (PPCS1D) | type-1 catalytic subunit delta isoform | | | |
| | | | (PPCS1D) mRNA, complete cds | | | |
| 2530 | H3121C02 | “Mus musculus follistatin-like (Fstl), | | BG086054 | Mm.22763 | Signal Transduction |
| 2531 | | mRNA” | | | | |
| 2532 | H3121E04 | retinal short-chain | Mus musculus retinal short-chain | BG086076 | Mm.14063 | Energy/Metabolism |
| 2533 | | dehydrogenase/reductase 1 (Rsdr1- | dehydrogenase/reductase 1 (Rsdr1- | | | |
| | | pending), | pending), mRNA | | | |
| 2534 | H3122B07 | “Mus musculus heat-responsive protein | | BG073398 | Mm.2607 | Heat Shock/Stress |
| 2535 | | 12 (Hrsp12), mRNA” | | | | |
| 2536 | H3122D07 | “Mus musculus heat shock protein, 74 kDa, | | BG073420 | Mm.2849 | Heat Shock/Stress |
| 2537 | | A (Hspa9a), mRNA” | | | | |
| 2538 | H3122E12 | ATP synthase beta subunit (ATPSB) | Human ATP synthase beta subunit | BG073436 | Mm.17869 | Energy/Metabolism |
| 2539 | | gene | (ATPSB) gene, complete cds | | | |
| 2540 | H3122F01 | ATP synthase beta subunit (ATPSB) | Human ATP synthase beta subunit | BG073437 | Mm.17869 | Energy/Metabolism |
| 2541 | | gene | (ATPSB) gene, complete cds | | | |
| 2542 | H3122F04 | ATP-binding cassette, sub-family D | Mus musculus ATP-binding cassette, | BG086172 | Mm.87806 | Energy/Metabolism |
| 2543 | | (ALD), member 4 (Abcd4), | sub-family D (ALD), member 4 | | | |
| | | | (Abcd4), mRNA | | | |
| 2544 | H3122F12 | sterol-carrier protein X | Mus musculus sterol-carrier protein X | BG086180 | Mm.1779 | Matrix/Structural |
| 2545 | | | mRNA, complete cds | | | Proteins |
| 2546 | H3122G01 | sterol-carrier protein X | Mus musculus sterol-carrier protein X | BG086181 | Mm.1779 | Matrix/Structural |
| 2547 | | | mRNA, complete cds | | | Proteins |
| 2548 | H3122H03 | brain cDNA, clone MNCb-0663, similar | Mus musculus brain cDNA, clone | BG086194 | Mm.28124 | |
| 2549 | | to augmenter of liver regeneration (Alr) | MNCb-0663, similar to Mus musculus | | | |
| | | | augmenter of liver regeneration (Alr) | | | |
| | | | mRNA | | | |
| 2550 | H3123C04 | “Mus musculus GNB3 gene for GTP- | | BG073494 | Mm.35708 | Signal Transduction |
| 2551 | | binding protein beta3 subunit, complete | | | | |
| | | cds” | | | | |
| 2552 | H3123D10 | BCL2/adenovirus E1B 19 kD-interacting | Homo sapiens BCL2/adenovirus E1B | BG073508 | Mm.21795 | Apoptosis |
| 2553 | | protein 1 (BNIP1), | 19 kD-interacting protein 1 (BNIP1), | | | |
| | | | mRNA | | | |
| 2554 | H3123G10 | mannoside | Mus musculus mannoside | BG073537 | Mm.2672 | Energy/Metabolism |
| 2555 | | acetylglucosaminyltransferase 1 | acetylglucosaminyltransferase 1 | | | |
| | | (Mgat1), | (Mgat1), mRNA | | | |
| 2556 | H3123H05 | “Homo sapiens tumor protein p53- | | BG086271 | Mm.23595 | Signal Transduction |
| 2557 | | binding protein, 2 (TP53BP2), mRNA” | | | | |
| 2558 | H3123H07 | novel cell death-regulatory protein | Mus musculus novel cell death- | BG086273 | Mm.21162 | Apoptosis |
| 2559 | | GRIM19 (Grim19) | regulatory protein GRIM19 (Grim19) | | | |
| | | | mRNA, complete cds | | | |
| 2560 | H3124B02 | “Mus musculus cold inducible RNA- | | BG086286 | Mm.17898 | Heat Shock/Stress |
| 2561 | | binding protein (Cirbp), mRNA” | | | | |
| 2562 | H3124D02 | ferrochelatase (Fech), | Mus musculus ferrochelatase (Fech), | BG086309 | Mm.1070 | Energy/Metabolism |
| 2563 | | | mRNA | | | |
| 2564 | H3124D04 | caspase 9 (Casp9), | Mus musculus caspase 9 (Casp9), | BG086310 | Mm.102926 | Apoptosis |
| 2565 | | | mRNA | | | |
| 2566 | H3124D06 | DNA fragmentation factor, 40 kD, beta | Mus musculus DNA fragmentation | BG086312 | Mm.38853 | Apoptosis |
| 2567 | | subunit (Dffb), | factor, 40 kD, beta subunit (Dffb), | | | |
| | | | mRNA | | | |
| 2568 | H3124D11 | mitotic arrest deficient 1-like 1 | Mus musculus mitotic arrest deficient | | Mm.27250 | Cell Cycle |
| 2569 | | (Mad111), | 1-like 1 (Mad111), mRNA | | | |
| 2570 | H3124E02 | hepatocyte growth factor-like protein | Mouse hepatocyte growth factor-like | BG073592 | Mm.21989 | Energy/Metabolism |
| 2571 | | gene | protein gene, complete cds | | | |
| 2572 | H3124F04 | microsomal glutathione S-transferase | Mus musculus microsomal glutathione | BG086330 | Mm.14796 | Energy/Metabolism |
| 2573 | | (Gst), | S-transferase (Gst), mRNA | | | |
| 2574 | H3124H01 | NADH dehydrogenase (ubiquinone) 1 | Homo sapiens NADH dehydrogenase | BG086348 | Mm.8688 | Energy/Metabolism |
| 2575 | | beta subcomplex, 10 (22 kD, PDSW) | (ubiquinone) 1 beta subcomplex, 10 | | | |
| | | (NDUFB10), | (22 kD, PDSW) (NDUFB10), mRNA | | | |
| 2576 | H3125A06 | “Mus musculus glycogen synthase | | BG086363 | | Signal Transduction |
| 2577 | | kinase 3 beta (Gsk3b), mRNA” | | | | |
| 2578 | H3125A09 | glutathione peroxidase 3 (Gpx3), | Mus musculus glutathione peroxidase 3 | BG073718 | Mm.7156 | Energy/Metabolism |
| 2579 | | | (Gpx3), mRNA | | | |
| 2580 | H3125B05 | “Homo sapiens heat shock transcription | | BG086370 | Mm.75856 | Heat Shock/Stress |
| 2581 | | factor 2 binding protein (HSF2BP), | | | | |
| | | mRNA” | | | | |
| 2582 | H3125C08 | ribonuclease III (RN3) | Homo sapiens ribonuclease III (RN3) | BG086378 | | Energy/Metabolism |
| 2583 | | | mRNA, complete cds | | | |
| 2584 | H3125C10 | major histocompatibility locus class III | Mus musculus major histocompatibility | BG086380 | Mm.1457 | Energy/Metabolism |
| 2585 | | regions Hsc70t gene, partial cds; | locus class III regions Hsc70t gene, | | | |
| | | smRNP, G7A, NG23, MutS homolog, | partial cds; smRNP, G7A, NG23, MutS | | | |
| | | CLCP, NG24, NG25, and NG26 genes; | homolog, CLCP, NG24, NG25, and | | | |
| | | and unknown genes | NG26 genes, complete cds; and | | | |
| | | | unknown genes | | | |
| 2586 | H3125D09 | “Homo sapiens suppression of | | BG086389 | Mm.4908 | Heat Shock/Stress |
| 2587 | | tumorigenicity 13 (colon carcinoma) | | | | |
| | | (Hsp70-interacting protein) (ST13), | | | | |
| | | mRNA” | | | | |
| 2588 | H3125E01 | cytosolic acyl coenzyme A thioester | Homo sapiens cytosolic acyl coenzyme | BG086391 | Mm.142740 | Energy/Metabolism |
| 2589 | | hydrolase (HBACH), | A thioester hydrolase (HBACH), | | | |
| | | | mRNA | | | |
| 2590 | H3125F03 | thioredoxin (Txn), | Mus musculus thioredoxin (Txn), | BG086400 | Mm.1275 | Energy/Metabolism |
| 2591 | | | mRNA | | | |
| 2592 | H3125F07 | protein translocase, JM26 protein, UDP- | Homo sapiens protein translocase, | | Mm.27393 | Matrix/Structural |
| 2593 | | galactose translocator, pim-2 | JM26 protein, UDP-galactose | | | Proteins |
| | | protooncogene homolog pim-2h, and | translocator, pim-2 protooncogene | | | |
| | | shal-type potassium channel genes; | homolog pim-2h, and shal-type | | | |
| | | JM12 protein and transcription | potassium channel genes, complete cds; | | | |
| | | | JM12 protein and transcription | | | |
| 2594 | H3125H05 | M. musculus RPS3a gene | M. musculus RPS3a gene | | Mm.16228 | Apoptosis |
| 2595 | | | | | | |
| 2596 | H3126B12 | “Mus musculus protein kinase inhibitor, | | BG086437 | Mm.10091 | Signal Transduction |
| 2597 | | gamma (Pkig), mRNA” | | | | |
| 2598 | H3126C12 | protease (prosome, macropain) 28 | Mus musculus protease (prosome, | BG073636 | Mm.830 | Energy/Metabolism |
| 2599 | | subunit, alpha (Psme1), | macropain) 28 subunit, alpha (Psme1), | | | |
| | | | mRNA | | | |
| 2600 | H3126F10 | spermine synthase (Sms), | Mus musculus spermine synthase (Sms), | BG086479 | Mm.3553 | Energy/Metabolism |
| 2601 | | | mRNA | | | |
| 2602 | H3127G05 | palmitoyl-protein thioesterase (Ppt), | Mus musculus palmitoyl-protein | BG086559 | Mm.43660 | Energy/Metabolism |
| 2603 | | | thioesterase (Ppt), mRNA | | | |
| 2604 | H3127G08 | cDNA FLJ13974 fis, clone | Homo sapiens cDNA FLJ13974 fis, | BG086562 | Mm.41565 | Energy/Metabolism |
| 2605 | | Y79AA1001581, weakly similar to | clone Y79AA1001581, weakly similar | | | |
| | | ACETYL-COENZYME A | to ACETYL-COENZYME A | | | |
| | | SYNTHETASE (EC 6.2.1.1) | SYNTHETASE (EC 6.2.1.1) | | | |
| 2606 | H3128D01 | s-adenosylmethionine synthetase | Mouse s-adenosylmethionine | BG086604 | Mm.14064 | Energy/Metabolism |
| 2607 | | | synthetase mRNA | | | |
| 2608 | H3128D02 | thioredoxin interacting factor (Vdup1) | Mus musculus thioredoxin interacting | BG086605 | Mm.77432 | Energy/Metabolism |
| 2609 | | gene | factor (Vdup1) gene, complete cds | | | |
| 2610 | H3129C03 | solute carrier family 4 (anion | Mus musculus solute carrier family 4 | BG086676 | Mm.7248 | Energy/Metabolism |
| 2611 | | exchanger), member 1 (Slc4a1), | (anion exchanger), member 1 (Slc4a1), | | | |
| | | | mRNA | | | |
| 2612 | H3129C06 | protein-L-isoaspartate (D-aspartate) O- | Mus musculus protein-L-isoaspartate | BG086679 | Mm.25169 | Energy/Metabolism |
| 2613 | | methyltransferase 1 (Pcmt1), | (D-aspartate) O-methyltransferase 1 | | | |
| | | | (Pcmt1), mRNA | | | |
| 2614 | H3129D08 | “Homo sapiens candidate tumor | | BG086692 | Mm.43482 | Signal Transduction |
| 2615 | | suppressor p33 ING1 homolog | | | | |
| | | (LOC51147), mRNA” | | | | |
| 2616 | H3129E06 | OXA1L gene sequence | Homo sapiens OXA1L gene complete | BG086699 | Mm.142455 | Apoptosis |
| 2617 | | | sequence | | | |
| 2618 | H3129E10 | “Mus musculus Pro-rich, PH, SH2 | | BG086702 | Mm.8538 | Signal Transduction |
| 2619 | | domain-containing signaling mediator | | | | |
| | | (PSM) mRNA, complete cds” | | | | |
| 2620 | H3129E12 | Mus musculus IFN alpha-treated | | BG086704 | Mm.23836 | Heat Shock/Stress |
| 2621 | | embryonic fibroblast mRNA | | | | |
| 2622 | H3129F04 | clone TA-9 ATP synthase b chain | Mus musculus clone TA-9 ATP | | Mm.30112 | Energy/Metabolism |
| 2623 | | homolog, partial cds | synthase b chain homolog mRNA, | | | |
| | | | partial cds | | | |
| 2624 | H3129G02 | serine palmitoyltransferase, long chain | Mus musculus serine | BG074002 | Mm.6505 | Energy/Metabolism |
| 2625 | | base subunit 1 (Sptlc1), | palmitoyltransferase, long chain base | | | |
| | | | subunit 1 (Sptlc1), mRNA | | | |
| 2626 | H3129G06 | peroxisomal assembly protein PEX3P | Mus musculus peroxisomal assembly | BG086720 | | Energy/Metabolism |
| 2627 | | (Pex3) gene, promoter and exon 1 | protein PEX3P (Pex3) gene, promoter | | | |
| | | | and exon 1 | | | |
| 2628 | H3129H03 | hydroxylacyl-Coenzyme A | Mus musculus hydroxylacyl-Coenzyme | BG086728 | Mm.2491 | Energy/Metabolism |
| 2629 | | dehydrogenase (Hadh), | A dehydrogenase (Hadh), mRNA | | | |
| 2630 | H3129H05 | K—Cl cotransporter KCC3 | Homo sapiens K—Cl cotransporter | BG086729 | Mm.21915 | Energy/Metabolism |
| 2631 | | | KCC3 mRNA, complete cds | | | |
| 2632 | H3130B10 | SERCA2 gene, alternative transcripts | Mus musculus SERCA2 gene, | BG074044 | Mm.42255 | Energy/Metabolism |
| 2633 | | | alternative transcripts | | | |
| 2634 | H3130B11 | “Mouse Cu—Zn superoxide dismutase | | BG074045 | Mm.5274 | Heat Shock/Stress |
| 2635 | | mRNA, complete cds” | | | | |
| 2636 | H3130C02 | “Mus musculus calcineurin inhibitor | | BG086761 | Mm.56 | Signal Transduction |
| 2637 | | mRNA, complete cds, alternatively | | | | |
| | | spliced” | | | | |
| 2638 | H3130D06 | Na, K-ATPase beta subunit (ATP1B) | Human Na, K-ATPase beta subunit | BG086774 | | Energy/Metabolism |
| 2639 | | gene, exons 1 and 2 | (ATP1B) gene, exons 1 and 2 | | | |
| 2640 | H3130D08 | NADH/NADPH mitogenic oxidase | Rattus norvegicus NADH/NADPH | | Mm.2866 | |
| 2641 | | subunit p65-mox | mitogenic oxidase subunit p65-mox | | | |
| | | | mRNA, complete cds | | | |
| 2642 | H3130H07 | 3-hydroxy-3-methylglutaryl-Coenzyme | | | Mm.10633 | |
| 2643 | | A synthase 2 mHS | | | | |
| 2644 | H3131A03 | “Mus musculus heat shock protein, 86 kDa | | BG074109 | Mm.1843 | Heat Shock/Stress |
| 2645 | | 1 (Hsp86-1), mRNA” | | | | |
| 2646 | H3131A05 | ATP synthase gamma-subunit precursor | Mus musculus mRNA for ATP synthase | BG074111 | Mm.12677 | Energy/Metabolism |
| 2647 | | | gamma-subunit precursor complete cds | | | |
| 2648 | H3131A07 | enoyl coenzyme A hydratase 1, | Mus musculus enoyl coenzyme A | BG074113 | Mm.2112 | Energy/Metabolism |
| 2649 | | peroxisomal (Ech1), | hydratase 1, peroxisomal (Ech1), | | | |
| | | | mRNA | | | |
| 2650 | H3131A12 | MA-3 (apoptosis-related gene) | Mouse MA-3 (apoptosis-related gene) | BG086831 | Mm.26035 | Apoptosis |
| 2651 | | | mRNA, complete cds | | | |
| 2652 | H3131B04 | sterol-carrier protein X | Mus musculus sterol-carrier protein X | BG086835 | Mm.1779 | Matrix/Structural |
| 2653 | | | mRNA, complete cds | | | Proteins |
| 2654 | H3131C10 | dolichyl-di-phosphooligosaccharide- | Mus musculus dolichyl-di- | BG074138 | Mm.7236 | Energy/Metabolism |
| 2655 | | protein glycotransferase (Ddost), | phosphooligosaccharide-protein | | | |
| | | | glycotransferase (Ddost), mRNA | | | |
| 2656 | H3131D05 | solute carrier family 39 (iron-regulated | Mus musculus solute carrier family 39 | BG074144 | Mm.28756 | Energy/Metabolism |
| 2657 | | transporter), member 1 (Slc39a1), | (iron-regulated transporter), member 1 | | | |
| | | | (Slc39a1), mRNA | | | |
| 2658 | H3131G02 | caspase 12 (Casp12), | Mus musculus caspase 12 (Casp12), | BG086881 | Mm.42163 | Apoptosis |
| 2659 | | | mRNA | | | |
| 2660 | H3131H01 | H. sapiens gene for rho GDP | | BG086892 | Mm.30016 | Signal Transduction |
| 2661 | | dissociation inhibitor (GDI) | | | | |
| 2662 | H3132C10 | “Mus musculus neuroblastoma ras | | BG086925 | Mm.734 | Signal Transduction |
| 2663 | | oncogene (Nras), mRNA” | | | | |
| 2664 | H3132F06 | “Homo sapiens pleiomorphic adenoma | | BG074245 | Mm.23923 | Signal Transduction |
| 2665 | | gene-like 2 (PLAGL2), mRNA” | | | | |
| 2666 | H3132G04 | “Homo sapiens ER-associated DNAJ; | | BG086956 | Mm.37516 | Heat Shock/Stress |
| 2667 | | ER-associated Hsp40 co-chaperone; | | | | |
| | | hDj9; ERj3 (LOC51726), mRNA” | | | | |
| 2668 | H3132G09 | vacuolar ATPase subunit H | Homo sapiens vacuolar ATPase subunit | BG086960 | Mm.27082 | Energy/Metabolism |
| 2669 | | | H mRNA, complete cds | | | |
| 2670 | H3132H07 | “Mus musculus tumor susceptibility | | BG086965 | Mm.22688 | Signal Transduction |
| 2671 | | protein 101 (tsg101) gene, complete | | | | |
| | | cds” | | | | |
| 2672 | H3133A06 | glutathione S-transferase, mu 1 (Gstm1), | Mus musculus glutathione S-transferase, | BG086970 | Mm.2011 | Energy/Metabolism |
| 2673 | | | mu 1 (Gstm1), mRNA | | | |
| 2674 | H3133B05 | cytochrome c oxidase subunit VIb | Homo sapiens cytochrome c oxidase | BG074277 | Mm.400 | Energy/Metabolism |
| 2675 | | (COX6B), | subunit VIb (COX6B), mRNA | | | |
| 2676 | H3133C08 | “Mus musculus RAB7, member RAS | | BG086994 | Mm.4268 | Signal Transduction |
| 2677 | | oncogene family (Rab7), mRNA” | | | | |
| 2678 | H3133D04 | NADH dehydrogenase (ubiquinone) | Homo sapiens NADH dehydrogenase | BG087002 | Mm.2206 | Energy/Metabolism |
| 2679 | | flavoprotein 2 (24 kD) (NDUFV2), | (ubiquinone) flavoprotein 2 (24 kD) | | | |
| | | | (NDUFV2), mRNA | | | |
| 2680 | H3133D06 | | | | Mm.21535 | Heat Shock/Stress |
| 2681 | | | | | | |
| 2682 | H3133E07 | glycine amidinotransferase (L- | Homo sapiens glycine | BG087011 | Mm.29975 | Energy/Metabolism |
| 2683 | | arginine: glycine amidinotransferase) | amidinotransferase (L-arginine: glycine | | | |
| | | (GATM), | amidinotransferase) (GATM), mRNA | | | |
| 2684 | H3133H01 | “Mus musculus heat shock 70 protein | | BG087043 | Mm.2144 | Heat Shock/Stress |
| 2685 | | (Hsc70) gene, complete cds” | | | | |
| 2686 | H3133H05 | M. musculus arylsulfatase A | M. musculus mRNA for arylsulfatase A | BG087046 | Mm.620 | Energy/Metabolism |
| 2687 | | | | | | |
| 2688 | H3133H07 | voltage-dependent anion channel 3 | Mus musculus voltage-dependent anion | BG087048 | Mm.133962 | Energy/Metabolism |
| 2689 | | (Vdac3), | channel 3 (Vdac3), mRNA | | | |
| 2690 | H3134C07 | DNA, DLEC1 to ORCTL4 gene region, | Homo sapiens DNA, DLEC1 to | BG087037 | Mm.42275 | Energy/Metabolism |
| 2691 | | section 1/2 (DLEC1, ORCTL3, | ORCTL4 gene region, section 1/2 | | | |
| | | ORCTL4 genes) | (DLEC1, ORCTL3, ORCTL4 genes, | | | |
| | | | complete cds) | | | |
| 2692 | H3134D06 | GrpE-like 2, mitochondrial mt- | | | Mm.12959 | Heat Shock/Stress |
| 2693 | | GrpE#2 | | | | |
| 2694 | H3135A03 | NADH dehydrogenase (ubiquinone) 1 | Homo sapiens NADH dehydrogenase | BG087056 | Mm.19834 | Energy/Metabolism |
| 2695 | | alpha subcomplex, 8 (19 kD, PGIV) | (ubiquinone) 1 alpha subcomplex, 8 | | | |
| | | (NDUFA8), | (19 kD, PGIV) (NDUFA8), mRNA | | | |
| 2696 | H3135B06 | cDNA DKFZp434D175 (from clone | Homo sapiens mRNA; cDNA | BG087066 | Mm.30110 | Energy/Metabolism |
| 2697 | | DKFZp434D175); partial cds | DKFZp434D175 (from clone | | | |
| | | | DKFZp434D175); partial cds | | | |
| 2698 | H3135B10 | “Mus musculus PL-6 (P16), mRNA” | | BG087070 | Mm.27312 | Signal Transduction |
| 2699 | | | | | | |
| 2700 | H3135D06 | galactose-1-phosphate uridyltransferase | Mus musculus galactose-1-phosphate | BG087088 | Mm.2420 | Energy/Metabolism |
| 2701 | | (GALT) gene | uridyltransferase (GALT) gene, | | | |
| | | | complete cds | | | |
| 2702 | H3135F04 | Mm.87124 | | | Mm.87124 | Energy/Metabolism |
| 2703 | | | | | | |
| 2704 | H3135F06 | | | | | Heat Shock/Stress |
| 2705 | H3135G03 | serine protease inhibitor 3 (Spi3), | Mus musculus serine protease inhibitor | BG087117 | Mm.2623 | Energy/Metabolism |
| 2706 | | | 3 (Spi3), mRNA | | | |
| 2707 | H3135G07 | protoporphyrinogen oxidase (Ppox), | Mus musculus protoporphyrinogen | BG087120 | Mm.4730 | Energy/Metabolism |
| 2708 | | | oxidase (Ppox), mRNA | | | |
| 2709 | H3135H04 | rhodanese (Tst) | Mus musculus rhodanese (Tst) mRNA, | | Mm.15312 | |
| 2710 | | | complete cds | | | |
| 2711 | H3135H10 | D-dopachrome tautomerase gene | Mus musculus D-dopachrome | BG087134 | Mm.5731 | Energy/Metabolism |
| 2712 | | | tautomerase gene, complete cds | | | |
| 2713 | H3136A06 | calcium-sensitive chloride conductance | Mus musculus calcium-sensitive | BG087141 | Mm.20897 | Energy/Metabolism |
| 2714 | | protein-1 (mCLCA1) | chloride conductance protein-1 | | | |
| | | | (mCLCA1) mRNA, complete cds | | | |
| 2715 | H3136B09 | branched chain ketoacid dehydrogenase | Mus musculus branched chain ketoacid | BG087153 | Mm.25848 | Energy/Metabolism |
| 2716 | | E1, alpha polypeptide (Bckdha), | dehydrogenase E1, alpha polypeptide | | | |
| | | | (Bckdha), mRNA | | | |
| 2717 | H3136C07 | BCL2/adenovirus E1B 19 kDa- | Mus musculus BCL2/adenovirus E1B | BG087162 | Mm.2159 | Apoptosis |
| 2718 | | interacting protein 1, NIP3 (Bnip3), | 19 kDa-interacting protein 1, NIP3 | | | |
| | | | (Bnip3), mRNA | | | |
| 2719 | H3136D05 | serine protease | Mus musculus serine protease mRNA, | BG087171 | Mm.24276 | Energy/Metabolism |
| 2720 | | | complete cds | | | |
| 2721 | H3136E12 | gene uncoupling protein-2 | Mus musculus gene for uncoupling | | Mm.144413 | |
| 2722 | | | protein-2, complete cds | | | |
| 2723 | H3136F07 | guanine monphosphate synthetase | Homo sapiens guanine monphosphate | BG087194 | Mm.28299 | Energy/Metabolism |
| 2724 | | (GMPS), | synthetase (GMPS), mRNA | | | |
| 2725 | H3136F10 | serine protease inhibitor 3 (Spi3), | Mus musculus serine protease inhibitor | BG087196 | | Energy/Metabolism |
| 2726 | | | 3 (Spi3), mRNA | | | |
| 2727 | H3136G10 | solute carrier family 12, member 2 | Mus musculus solute carrier family 12, | BG074576 | Mm.4168 | Energy/Metabolism |
| 2728 | | (Slc12a2), | member 2 (Slc12a2), mRNA | | | |
| 2729 | H3136H12 | “Mus musculus IkB kinase-beta (Ikkb) | | BG087220 | Mm.28269 | Signal Transduction |
| 2730 | | mRNA, complete cds” | | | | |
| 2731 | H3137A09 | pyruvate decarboxylase (Pcx), | Mus musculus pyruvate decarboxylase | BG087228 | Mm.1845 | Energy/Metabolism |
| 2732 | | | (Pcx), mRNA | | | |
| 2733 | H3137B06 | ornithine aminotransferase (Oat), | Mus musculus ornithine | BG087236 | Mm.13694 | Energy/Metabolism |
| 2734 | | | aminotransferase (Oat), mRNA | | | |
| 2735 | H3137B09 | “Homo sapiens Rho guanine nucleotide | | BG087239 | Mm.41604 | Signal Transduction |
| 2736 | | exchange factor (GEF) 4 (ARHGEF4), | | | | |
| | | mRNA” | | | | |
| 2737 | H3137C10 | ATP-binding cassette, sub-family A | Homo sapiens ATP-binding cassette, | BG087249 | Mm.38313 | Energy/Metabolism |
| 2738 | | (ABC1), member 3 (ABCA3), | sub-family A (ABC1), member 3 | | | |
| | | | (ABCA3), mRNA | | | |
| 2739 | H3137D07 | ATP-binding cassette, sub-family E | Mus musculus ATP-binding cassette, | BG087256 | Mm.5831 | Energy/Metabolism |
| 2740 | | (OABP), member 1 (Abce1), | sub-family E (OABP), member 1 | | | |
| | | | (Abce1), mRNA | | | |
| 2741 | H3137D08 | VLCAD gene | Mus musculus VLCAD gene | BG074630 | Mm.18630 | Energy/Metabolism |
| 2742 | | | | | | |
| 2743 | H3137D09 | solute carrier family 4 (anion | Mus musculus solute carrier family 4 | BG074631 | Mm.4580 | Energy/Metabolism |
| 2744 | | exchanger), member 2 (Slc4a2), | (anion exchanger), member 2 (Slc4a2), | | | |
| | | | mRNA | | | |
| 2745 | H3137E02 | NADH dehydrogenase (ubiquinone) Fe—S | Homo sapiens NADH dehydrogenase | BG087262 | Mm.21669 | Energy/Metabolism |
| 2746 | | protein 2 (49 kD) (NADH-coenzyme | (ubiquinone) Fe—S protein 2 (49 kD) | | | |
| | | Q reductase) (NDUFS2), | (NADH-coenzyme Q reductase) | | | |
| | | | (NDUFS2), mRNA | | | |
| 2747 | H3137E03 | anion exchanger 3 brain and anion | Mus musculus anion exchanger 3 brain | BG074636 | Mm.5053 | Energy/Metabolism |
| 2748 | | exchanger 3 cardiac isoms (Slc4a3) | and anion exchanger 3 cardiac isoforms | | | |
| | | gene, alternatively spliced | (Slc4a3) gene, complete cds, | | | |
| | | | alternatively spliced | | | |
| 2749 | H3137G05 | ribosomal protein L17 isolog | Homo sapiens ribosomal protein L17 | BG087283 | Mm.44225 | Energy/Metabolism |
| 2750 | | (LOC63875), | isolog (LOC63875), mRNA | | | |
| 2751 | H3137G09 | Mouse mRNA for protein tyrosine | | BG087286 | Mm.4220 | Signal Transduction |
| 2752 | | phosphatase PTPT9 | | | | |
| 2753 | H3138B02 | neuronal apoptosis inhibitory protein 6 | Mus musculus neuronal apoptosis | BG087312 | Mm.13437 | Apoptosis |
| 2754 | | (Naip6) gene; and Naip3 gene, exons 2-9 | inhibitory protein 6 (Naip6) gene, | | | |
| | | and 11-16 | complete cds; and Naip3 gene, exons 2-9 | | | |
| | | | and 11-16 | | | |
| 2755 | H3138C04 | phosphoglucomutase 1 (PGM1), | Homo sapiens phosphoglucomutase 1 | BG087325 | Mm.22403 | Energy/Metabolism |
| 2756 | | | (PGM1), mRNA | | | |
| 2757 | H3138D04 | hypothetical protein FLJ10545 | Homo sapiens hypothetical protein | BG074710 | Mm.9870 | Energy/Metabolism |
| 2758 | | (FLJ10545), | FLJ10545 (FLJ10545), mRNA | | | |
| 2759 | H3138D07 | voltage-dependent anion channel 2 | Mus musculus voltage-dependent anion | BG087336 | Mm.569 | Energy/Metabolism |
| 2760 | | (Vdac2), | channel 2 (Vdac2), mRNA | | | |
| 2761 | H3138E10 | aldehyde dehydrogenase 5 (ALDH5), | Homo sapiens aldehyde dehydrogenase | BG087349 | Mm.24457 | Energy/Metabolism |
| 2762 | | | 5 (ALDH5), mRNA | | | |
| 2763 | H3138F05 | ADP-ribosylation factor 4 (Arf4), | Mus musculus ADP-ribosylation factor | BG087356 | Mm.1486 | Energy/Metabolism |
| 2764 | | | 4 (Arf4), mRNA | | | |
| 2765 | H3138G02 | solute carrier family 22 (organic cation | Mus musculus solute carrier family 22 | BG087364 | Mm.42253 | Energy/Metabolism |
| 2766 | | transporter), member 5 (Slc22a5), | (organic cation transporter), member 5 | | | |
| | | | (Slc22a5), mRNA | | | |
| 2767 | H3138G09 | alpha glucosidase 2, alpha neutral | Mus musculus alpha glucosidase 2, | BG087370 | Mm.3196 | Energy/Metabolism |
| 2768 | | subunit (G2an), | alpha neutral subunit (G2an), mRNA | | | |
| 2769 | H3138H04 | long-chain acyl-CoA synthetase | Homo sapiens mRNA for long-chain | BG074754 | Mm.28962 | Energy/Metabolism |
| 2770 | | | acyl-CoA synthetase, complete cds | | | |
| 2771 | H3138H07 | 78 kDa gastrin-binding protein | Human 78 kDa gastrin-binding protein | BG087380 | Mm.16773 | Energy/Metabolism |
| 2772 | | | mRNA, complete cds | | | |
| 2773 | H3138H10 | M. musculus mRNA for cathepsin D | | BG087383 | Mm.2147 | Signal Transduction |
| 2774 | | | | | | |
| 2775 | H3139B06 | “Mus musculus protein tyrosine | | BG087401 | Mm.5400 | Signal Transduction |
| 2776 | | phosphatase, non-receptor type 13 | | | | |
| | | interacting protein (Ptpn13ip), mRNA” | | | | |
| 2777 | H3139C01 | ubi-d4/requiem gene, exons 2 through | Mus musculus ubi-d4/requiem gene, | BG087408 | Mm.2651 | Apoptosis |
| 2778 | | 11 and partial cds | exons 2 through 11 and partial cds | | | |
| 2779 | H3139E01 | “Mus musculus heat shock 70 protein | | BG087426 | | Heat Shock/Stress |
| 2780 | | (Hsc70) gene, complete cds” | | | | |
| 2781 | H3139F01 | sterol O-acyltransferase 1 (Soat1), | Mus musculus sterol O-acyltransferase 1 | BG087432 | Mm.28099 | Energy/Metabolism |
| 2782 | | | (Soat1), mRNA | | | |
| 2783 | H3140A02 | solute carrier family 9 | Mus musculus solute carrier family 9 | BG087460 | Mm.4312 | Energy/Metabolism |
| 2784 | | (sodium/hydrogen exchanger), member | (sodium/hydrogen exchanger), member | | | |
| | | 1 (Slc9a1), | 1 (Slc9a1), mRNA | | | |
| 2785 | H3140A08 | “Mus musculus mitogen activated | | BG087465 | Mm.4437 | Signal Transduction |
| 2786 | | protein kinase 14 (Mapk14), mRNA” | | | | |
| 2787 | H3140A09 | CPT I = carnitine palmitoyltransferase I | CPT I = carnitine palmitoyltransferase I | | Mm.18522 | Energy/Metabolism |
| 2788 | | {3 region} [mice, JVS, hearts, Partial, | {3 region} [mice, JVS, hearts, mRNA | | | |
| | | 678 nt, segment 1 of 2] | Partial, 678 nt, segment 1 of 2] | | | |
| 2789 | H3140B07 | major histocompatibility locus class III | Mus musculus major histocompatibility | | Mm.1511 | |
| 2790 | | region: butyrophilin-like protein gene, | locus class III region: butyrophilin-like | | | |
| | | partial cds; Notch4, PBX2, RAGE, | protein gene, partial cds; Notch4, | | | |
| | | lysophatidic acid acyl transferase-alpha, | PBX2, RAGE, lysophatidic acid acyl | | | |
| | | palmitoyl-protein thioestera | transferase-alpha, palmitoyl-protein | | | |
| | | | thioestera | | | |
| 2791 | H3140C11 | clone RP11-486I22, sequence | Homo sapiens clone RP11-486I22, | BG074864 | Mm.3479 | Energy/Metabolism |
| 2792 | | | complete sequence | | | |
| 2793 | H3140D05 | ectonucleotide | Homo sapiens ectonucleotide | BG087491 | Mm.30145 | Energy/Metabolism |
| 2794 | | pyrophosphatase/phosphodiesterase 5 | pyrophosphatase/phosphodiesterase 5 | | | |
| | | (putative function) (ENPP5), | (putative function) (ENPP5), mRNA | | | |
| 2795 | H3140D07 | peroxiredoxin 3 (Prdx3), | Mus musculus peroxiredoxin 3 (Prdx3), | BG087493 | Mm.29821 | Energy/Metabolism |
| 2796 | | | mRNA | | | |
| 2797 | H3140D12 | electron-transfer-flavoprotein, alpha | Homo sapiens electron-transfer- | BG087498 | Mm.26949 | Energy/Metabolism |
| 2798 | | polypeptide (glutaric aciduria II) | flavoprotein, alpha polypeptide | | | |
| | | (ETFA), | (glutaric aciduria II) (ETFA), mRNA | | | |
| 2799 | H3140E04 | protein tyrosine phosphatase (70zshp) | Mouse protein tyrosine phosphatase | BG074880 | Mm.1484 | Energy/Metabolism |
| 2800 | | | (70zshp) mRNA, complete cds | | | |
| 2801 | H3140E08 | glutamate dehydrogenase (Glud), | Mus musculus glutamate dehydrogenase | BG087506 | Mm.10600 | Energy/Metabolism |
| 2802 | | | (Glud), mRNA | | | |
| 2803 | H3141F03 | solute carrier family 12, member 7 | Mus musculus solute carrier family 12, | BG087669 | Mm.24510 | Energy/Metabolism |
| 2804 | | (Slc12a7), | member 7 (Slc12a7), mRNA | | | |
| 2805 | H3141G03 | chs HMG CoA synthase, partial cds | Mus musculus chs HMG CoA synthase | BG087678 | Mm.10633 | Matrix/Structural |
| 2806 | | | mRNA, partial cds | | | Proteins |
| 2807 | H3142A02 | “Mus musculus protein phosphatase 2a, | | BG087694 | Mm.7418 | Signal Transduction |
| 2808 | | catalytic subunit, beta isoform (Ppp2cb), | | | | |
| | | mRNA” | | | | |
| 2809 | H3142A08 | ubiquinol-cytochrome c reductase core | Homo sapiens ubiquinol-cytochrome c | BG075002 | Mm.988 | Energy/Metabolism |
| 2810 | | protein II (UQCRC2), | reductase core protein II (UQCRC2), | | | |
| | | | mRNA | | | |
| 2811 | H3142E09 | “Mus musculus tumor-suppressing | | BG087715 | Mm.139675 | Signal Transduction |
| 2812 | | subchromosomal transferable fragment | | | | |
| | | 4 (Tssc4), mRNA” | | | | |
| 2813 | H3142G01 | | | | Mm.31203 | Heat Shock/Stress |
| 2814 | H3142G02 | methylenetetrahydrofolate | Homo sapiens | BG087719 | Mm.29584 | Energy/Metabolism |
| 2815 | | dehydrogenase (NADP+ dependent), | methylenetetrahydrofolate | | | |
| | | methenyltetrahydrofolate | dehydrogenase (NADP+ dependent), | | | |
| | | cyclohydrolase, myltetrahydrofolate | methenyltetrahydrofolate | | | |
| | | synthetase (MTHFD1), | cyclohydrolase, formyltetrahydrofolate | | | |
| | | | synthetase (MTHFD1), mRNA | | | |
| 2816 | H3141D09 | peroxisome membrane protein PEX2 | Mus musculus peroxisome membrane | BG075110 | Mm.16453 | Energy/Metabolism |
| 2817 | | | protein PEX2 mRNA, complete cds | | | |
| 2818 | H3143D10 | “Mouse cAMP-dependent protein kinase | | BG075111 | Mm.19111 | Signal Transduction |
| 2819 | | alpha subunit gene, exon 10” | | | | |
| 2820 | H3143D12 | presenilin-associated protein | Homo sapiens presenilin-associated | BG087589 | Mm.29650 | Energy/Metabolism |
| 2821 | | | protein mRNA, complete cds | | | |
| 2822 | H3143H07 | “Mus musculus osmotic stress protein | | BG075154 | Mm.4150 | Heat Shock/Stress |
| 2823 | | 94 (Osp94) mRNA, complete cds” | | | | |
| 2824 | H3144B03 | NADH-ubiquinone dehydrogenase 1 | Homo sapiens NADH-ubiquinone | BG087636 | Mm.4537 | Energy/Metabolism |
| 2825 | | beta subcomplex | dehydrogenase 1 beta subcomplex | | | |
| | | | mRNA, complete cds | | | |
| 2826 | H3144C01 | glyoxalase I (GLO1), | Homo sapiens glyoxalase I (GLO1), | BG087642 | Mm.17362 | Energy/Metabolism |
| 2827 | | | mRNA | | | |
| 2828 | H3144C11 | “Mus musculus heat shock 70 kD protein | | BG087650 | Mm.24162 | Heat Shock/Stress |
| 2829 | | 5 (glucose-regulated protein, 78 kD) | | | | |
| | | (Hspa5), mRNA” | | | | |
| 2830 | H3144E06 | neuronal cell death related gene in | Rattus norvegicus neuronal cell death | AW555571 | Mm.19440 | Apoptosis |
| | | neuron-7 (DN-7) | related gene in neuron-7 (DN-7) | | | |
| | | | mRNA, complete cds | | | |
| 2831 | H3144F09 | “Homo sapiens RAB7, member RAS | | BG075214 | Mm.34027 | Signal Transduction |
| 2832 | | oncogene family-like 1 (RAB7L1), | | | | |
| | | mRNA” | | | | |
| 2833 | H3144G02 | “Homo sapiens phosphodiesterase 5A, | | BG087768 | Mm.103149 | Signal Transduction |
| 2834 | | cGMP-specific (PDE5A), mRNA” | | | | |
| 2835 | H3144H01 | mitofilin, partial cds | Homo sapiens mitofilin mRNA, partial | | Mm.10706 | |
| 2836 | | | cds | | | |
| 2837 | H3145A03 | “Mus musculus partial Prkar1a gene for | | BG075240 | Mm.30039 | Signal Transduction |
| 2838 | | cAMP-dependent protein kinase | | | | |
| | | regulatory subunit RIalpha, exons 8-10 | | | | |
| | | and 3′UTR” | | | | |
| 2839 | H3145A06 | zinc transporter ZnT-3 (ZnT-3) | Mus musculus zinc transporter ZnT-3 | BG075243 | Mm.1396 | Energy/Metabolism |
| 2840 | | | (ZnT-3) mRNA, complete cds | | | |
| 2841 | H3145E01 | H. sapiens gene phosphate carrier | H. sapiens gene for phosphate carrier | BG075286 | Mm.5246 | Energy/Metabolism |
| 2842 | | | | | | |
| 2843 | H3145E12 | hyaluronidase 2 (Hyal2), | Mus musculus hyaluronidase 2 (Hyal2), | BG075294 | Mm.4834 | Energy/Metabolism |
| 2844 | | | mRNA | | | |
| 2845 | H3145F11 | | | | | Heat Shock/Stress |
| 2846 | | | | | | |
| 2847 | H3145H03 | M. musculus mRNA for mitogen | | BG075319 | Mm.8385 | Signal Transduction |
| 2848 | | activated protein kinase (erk-1) | | | | |
| 2849 | H3145H09 | peroxiredoxin 4 (Prdx4), | Mus musculus peroxiredoxin 4 (Prdx4), | BG075324 | Mm.19127 | Energy/Metabolism |
| 2850 | | | mRNA | | | |
| 2851 | H3145H10 | peroxiredoxin 4 (Prdx4), | Mus musculus peroxiredoxin 4 (Prdx4), | BG087872 | Mm.19127 | Energy/Metabolism |
| 2852 | | | mRNA | | | |
| 2853 | H3146A04 | “Mus musculus myo-inositol 1- | | BG075331 | Mm.29357 | Signal Transduction |
| 2854 | | phosphate synthase A1 (IsynA1) | | | | |
| | | mRNA, complete cds” | | | | |
| 2855 | H3146B10 | cDNA FLJ13847 fis, clone | Homo sapiens cDNA FLJ13847 fis, | BG087895 | Mm.24210 | Energy/Metabolism |
| 2856 | | THYRO1000852, highly similar to | clone THYRO1000852, highly similar | | | |
| | | branched-chain amino acid | to Human branched-chain amino acid | | | |
| | | aminotransferase (ECA40) | aminotransferase (ECA40) mRNA | | | |
| 2857 | H3146F01 | RHOA proto-oncogene multi-drug- | Homo sapiens RHOA proto-oncogene | BG087931 | Mm.757 | Energy/Metabolism |
| 2858 | | resistance protein, 3 end | multi-drug-resistance protein mRNA, 3 | | | |
| | | | end | | | |
| 2859 | H3146G06 | cDNA: FLJ22871 fis, clone KAT02533 | Homo sapiens cDNA: FLJ22871 fis, | | Mm.30065 | Energy/Metabolism |
| 2860 | | | clone KAT02533 | | | |
| 2861 | H3146H06 | CTL2 gene | Homo sapiens CTL2 gene | BG087957 | Mm.28209 | Energy/Metabolism |
| 2862 | | | | | | |
| 2863 | H3147B08 | “Mus musculus RAB11B, member RAS | | BG087979 | Mm.35727 | Signal Transduction |
| 2864 | | oncogene family (Rab11b), mRNA” | | | | |
| 2865 | H3147D12 | apoptosis inhibitory protein 5 (Api5), | Mus musculus apoptosis inhibitory | BG088003 | Mm.692 | Apoptosis |
| 2866 | | | protein 5 (Api5), mRNA | | | |
| 2867 | H3147E03 | “Mus musculus signal transducer and | | BG088006 | Mm.25298 | Signal Transduction |
| 2868 | | activator of transcription 3 interacting | | | | |
| | | protein 1 (Stat3ip1-pending), mRNA” | | | | |
| 2869 | H3147E04 | “Mus musculus heat shock protein, 84 kDa | | BG088007 | Mm.2180 | Heat Shock/Stress |
| 2870 | | 1 (Hsp84-1), mRNA” | | | | |
| 2871 | H3147E05 | “Mus musculus heat shock protein, 84 kDa | | BG088008 | Mm.2180 | Heat Shock/Stress |
| 2872 | | 1 (Hsp84-1), mRNA” | | | | |
| 2873 | H3147E06 | “Mus musculus heat shock protein, 84 kDa | | BG088009 | Mm.2180 | Heat Shock/Stress |
| 2874 | | 1 (Hsp84-1), mRNA” | | | | |
| 2875 | H3148B04 | ferredoxin reductase (Fdxr), | Mus musculus ferredoxin reductase | BG088056 | Mm.4719 | Energy/Metabolism |
| 2876 | | | (Fdxr), mRNA | | | |
| 2877 | H3148E08 | ornithine decarboxylase antizyme gene | Mus musculus ornithine decarboxylase | BG088091 | Mm.683 | Energy/Metabolism |
| 2878 | | | antizyme gene, complete cds | | | |
| 2879 | H3148F05 | NADH dehydrogenase (ubiquinone) Fe—S | Homo sapiens NADH dehydrogenase | BG088100 | Mm.2041 | Energy/Metabolism |
| 2880 | | protein 1 (75 kD) (NADH-coenzyme | (ubiquinone) Fe—S protein 1 (75 kD) | | | |
| | | Q reductase) (NDUFS1), | (NADH-coenzyme Q reductase) | | | |
| | | | (NDUFS1), mRNA | | | |
| 2881 | H3148G06 | “Mus musculus MgcRacGAP mRNA | | BG088110 | Mm.27141 | Signal Transduction |
| 2882 | | for GTPase activating protein, complete | | | | |
| | | cds” | | | | |
| 2883 | H3149B10 | “Mus musculus protein kinase C, zeta | | BG088144 | Mm.28561 | Signal Transduction |
| 2884 | | (Pkcz), mRNA” | | | | |
| 2885 | H3149B11 | membrane protein, palmitoylated (55 kDa) | Mus musculus membrane protein, | | Mm.2814 | Matrix/Structural |
| 2886 | | (Mpp1), | palmitoylated (55 kDa) (Mpp1), mRNA | | | Proteins |
| 2887 | H3149C10 | triosephosphate isomerase (Tpi), | Mus musculus triosephosphate | BG075608 | Mm.4222 | Energy/Metabolism |
| 2888 | | | isomerase (Tpi), mRNA | | | |
| 2889 | H3149E11 | sodium channel, voltage-gated, type II, | Homo sapiens sodium channel, voltage- | BG088175 | | Energy/Metabolism |
| 2890 | | beta polypeptide (SCN2B), | gated, type II, beta polypeptide | | | |
| | | | (SCN2B), mRNA | | | |
| 2891 | H3149H04 | 5-3 exoribonuclease 2 (Xrn2), | Mus musculus 5-3 exoribonuclease 2 | BG088199 | Mm.3065 | Energy/Metabolism |
| 2892 | | | (Xrn2), mRNA | | | |
| 2893 | H3150C08 | “Mus musculus Ste-20 related kinase | | BG088221 | Mm.29404 | Signal Transduction |
| 2894 | | (Spak-pending), mRNA” | | | | |
| 2895 | H3150D02 | “Mus musculus presenilin 1 (Psen1), | | BG088227 | Mm.998 | Signal Transduction |
| 2896 | | mRNA” | | | | |
| 2897 | H3150F06 | farnesyltransferase, CAAX box, alpha | Mus musculus farnesyltransferase, | BG075707 | Mm.3496 | Energy/Metabolism |
| 2898 | | (Fnta), | CAAX box, alpha (Fnta), mRNA | | | |
| 2899 | H3150G03 | cDNA: FLJ21905 fis, clone HEP03764 | Homo sapiens cDNA: FLJ21905 fis, | BG088257 | Mm.4290 | Energy/Metabolism |
| 2900 | | | clone HEP03764 | | | |
| 2901 | H3151C06 | “Homo sapiens PTPL1-associated | | BG088297 | | Signal Transduction |
| 2902 | | RhoGAP 1 (PARG1), mRNA” | | | | |
| 2903 | H3151D08 | defender against cell death 1 (Dad1), | Mus musculus defender against cell | BG075765 | Mm.2547 | Apoptosis |
| 2904 | | | death 1 (Dad1), mRNA | | | |
| 2905 | H3151D11 | prosaposin (psap\SGP-1) gene | Mus musculus prosaposin (psap\SGP-1) | BG088310 | Mm.3363 | Energy/Metabolism |
| 2906 | | | gene, complete cds | | | |
| 2907 | H3151E12 | “Mus musculus downstream of tyrosine | | BG088318 | Mm.156 | Signal Transduction |
| 2908 | | kinase 1 (Dok1), mRNA” | | | | |
| 2909 | H3151F06 | M. musculus xanthine dehydrogenase | M. musculus mRNA for xanthine | BG075778 | Mm.11223 | Energy/Metabolism |
| 2910 | | | dehydrogenase | | | |
| 2911 | H3152A02 | Rat beta-galactoside-alpha 2,6- | Rat beta-galactoside-alpha 2,6- | BG075800 | Mm.1944 | Energy/Metabolism |
| 2912 | | sialyltransferase | sialyltransferase mRNA | | | |
| 2913 | H3152D06 | 5-aminolevulinic acid synthase, 3 end | Mouse 5-aminolevulinic acid synthase | BG088378 | Mm.1217 | Energy/Metabolism |
| 2914 | | | mRNA, 3 end | | | |
| 2915 | H3152G07 | MAD2 (mitotic arrest deficient, yeast, | Homo sapiens MAD2 (mitotic arrest | | Mm.9648 | Cell Cycle |
| 2916 | | homolog)-like 2 (MAD2L2), | deficient, yeast, homolog)-like 2 | | | |
| | | | (MAD2L2), mRNA | | | |
| 2917 | H3152H05 | ATPase, class II, type 9A (Atp9a), | Mus musculus ATPase, class II, type 9A | BG075876 | Mm.10288 | Energy/Metabolism |
| 2918 | | | (Atp9a), mRNA | | | |
| 2918 | H3152H07 | NADH dehydrogenase (ubiquinone) 1 | Homo sapiens NADH dehydrogenase | BG088418 | Mm.28058 | Energy/Metabolism |
| 2919 | | beta subcomplex, 5 (16 kD, SGDH) | (ubiquinone) 1 beta subcomplex, 5 | | | |
| | | (NDUFB5), | (16 kD, SGDH) (NDUFB5), mRNA | | | |
| 2920 | H3153A02 | “Mus musculus calpain small subunit | | BG088424 | Mm.6534 | Signal Transduction |
| 2921 | | gene, exons 3 through 9 and partial cds” | | | | |
| 2922 | H3153A07 | “Homo sapiens zinedin (ZIN), mRNA” | | BG088429 | Mm.21612 | Signal Transduction |
| 2923 | | | | | | |
| 2924 | H3153B11 | Mm.666 | | | Mm.666 | Energy/Metabolism |
| 2925 | | | | | | |
| 2926 | H3153C09 | Mus musculus tissue inhibitor of | | BG088451 | Mm.19191 | Matrix/Structural |
| 2927 | | metalloproteinase 2 (Timp2), mRNA | | | | Proteins |
| 2928 | H3153C10 | “Homo sapiens protein phosphatase 2 | | BG088452 | Mm.21428 | Signal Transduction |
| 2930 | | (formerly 2A), regulatory subunit A (PR | | | | |
| | | 65), beta isoform (PPP2R1B), mRNA” | | | | |
| 2931 | H3153D05 | “Rattus norvegicus Diacylglycerol | | BG075920 | Mm.102207 | Signal Transduction |
| 2932 | | kinase 90 kDa (Dagk), mRNA” | | | | |
| 2933 | H3153D07 | p75NTR-associated cell death executor | Mus musculus p75NTR-associated cell | BG088461 | Mm.90787 | Apoptosis |
| 2934 | | (Nade) | death executor (Nade) mRNA, complete | | | |
| | | | cds | | | |
| 2935 | H3153E04 | NADH dehydrogenase (ubiquinone) 1 | Homo sapiens NADH dehydrogenase | BG088469 | Mm.29683 | Energy/Metabolism |
| 2936 | | beta subcomplex, 7 (18 kD, B18) | (ubiquinone) 1 beta subcomplex, 7 | | | |
| | | (NDUFB7), | (18 kD, B18) (NDUFB7), mRNA | | | |
| 2937 | H3153E08 | M. musculus mRNA for MAP kinase- | | BG088472 | Mm.29725 | Signal Transduction |
| 2938 | | activated protein kinase 2 | | | | |
| 2939 | H3153F08 | apoptotic cell clearance receptor | Mus Musculus apoptotic cell clearance | BG088494 | Mm.38825 | Apoptosis |
| 2940 | | PtdSerR | receptor PtdSerR mRNA, complete cds | | | |
| 2941 | H3153G02 | endonuclease G-like 1 (ENDOGL1), | Homo sapiens endonuclease G-like 1 | BG088499 | Mm.11669 | Energy/Metabolism |
| 2942 | | | (ENDOGL1), mRNA | | | |
| 2943 | H3153G08 | “Mus musculus RAS-related C3 | | BG088482 | Mm.1972 | Signal Transduction |
| 2944 | | botulinum substrate 2 (Rac2), mRNA” | | | | |
| 2945 | H3153H05 | peroxisomal delta3, delta2-enoyl- | Mus musculus peroxisomal delta3, | BG075962 | Mm.28883 | Energy/Metabolism |
| 2946 | | Coenzyme A isomerase (Peci-pending), | delta2-enoyl-Coenzyme A isomerase | | | |
| | | | (Peci-pending), mRNA | | | |
| 2947 | H3154A03 | “Mus musculus RAN, member RAS | | BG088511 | Mm.7521 | Signal Transduction |
| 2948 | | oncogene family (Ran), mRNA” | | | | |
| 2949 | H3154C11 | M. musculus glutamyl-tRNA synthetase | M. musculus mRNA for glutamyl-tRNA | BG088535 | Mm.27190 | Energy/Metabolism |
| 2950 | | | synthetase | | | |
| 2951 | H3154E07 | “Mus musculus growth arrest specific 6 | | BG088548 | Mm.3982 | Signal Transduction |
| 2952 | | (Gas6), mRNA” | | | | |
| 2953 | H3154F02 | asparagine synthetase | Mus musculus asparagine synthetase | BG088553 | Mm.2942 | Energy/Metabolism |
| 2954 | | | mRNA, complete cds | | | |
| 2955 | H3155B01 | beclin 1 (coiled-coil, myosin-like | Mus musculus beclin 1 (coiled-coil, | BG088587 | Mm.30040 | Apoptosis |
| 2956 | | BCL2-interacting protein) (Becn1), | myosin-like BCL2-interacting protein) | | | |
| | | | (Becn1), mRNA | | | |
| 2957 | H3155B07 | NADH dehydrogenase (ubiquinone) Fe—S | Homo sapiens NADH dehydrogenase | BG076060 | Mm.30113 | Energy/Metabolism |
| 2958 | | protein 3 (30 kD) (NADH-coenzyme | ubiquinone) Fe—S protein 3 (30 kD) | | | |
| | | Q reductase) (NDUFS3), | (NADH-coenzyme Q reductase) | | | |
| | | | (NDUFS3), mRNA | | | |
| 2959 | H3155C04 | “Rattus norvegicus mRNA for inositol | | BG076067 | Mm.22360 | Signal Transduction |
| 2960 | | hexakisphosphate kinase, complete cds” | | | | |
| 2961 | H3155C10 | UDP glucuronosyltransferase (UGT1- | Mus musculus UDP | BG076072 | Mm.42472 | Energy/Metabolism |
| 2962 | | 06) | glucuronosyltransferase (UGT1-06) | | | |
| | | | mRNA, complete cds | | | |
| 2963 | H3155E04 | NDUFV1 gene, exons 6-10 | Homo sapiens NDUFV1 gene, exons 6-10 | BG076088 | Mm.29842 | Energy/Metabolism |
| 2964 | | | | | | |
| 2965 | H3155F02 | | | | | Heat Shock/Stress |
| 2966 | | | | | | |
| 2967 | H3155G03 | Rat endoplasmic reticulum alpha- | Rat endoplasmic reticulum alpha- | BG088635 | Mm.33138 | Energy/Metabolism |
| 2968 | | mannosidase | mannosidase mRNA, complete cds | | | |
| 2969 | H3156A10 | H3156A10 | | | | Apoptosis |
| 2970 | | | | | | |
| 2971 | H3156C03 | “Mus musculus protein phosphatase 1D | | BG088678 | Mm.61848 | Signal Transduction |
| 2972 | | magnesium-dependent, delta isoform | | | | |
| | | (Ppm1d), mRNA” | | | | |
| 2973 | H3156C05 | cDNA DKFZp586F2224 (from clone | Homo sapiens mRNA; cDNA | BG076153 | Mm.28030 | Energy/Metabolism |
| 2974 | | DKFZp586F2224) | DKFZp586F2224 (from clone | | | |
| | | | DKFZp586F2224) | | | |
| 2975 | H3156C08 | “Mus musculus metaxin (Mtx), mRNA” | | BG076156 | Mm.22508 | Heat Shock/Stress |
| 2976 | | | | | | |
| 2977 | H3156H04 | H3156H04 | | | | Energy/Metabolism |
| 2978 | | | | | | |
| 2979 | H3157B03 | catalase 1 (Cas1), | Mus musculus putative phosphatase | BG076224 | Mm.1458 | Energy/Metabolism |
| 2980 | | | (Pps), mRNA | | | |
| 2981 | H3157B10 | “Mus musculus heat shock protein, | | BG088755 | Mm.27897 | Heat Shock/Stress |
| 2982 | | DNAJ-like 2 (Hsj2), mRNA” | | | | |
| 2983 | H3157C04 | caspase 6 (Casp6), | Mus musculus catalase 1 (Cas1), mRNA | BG076235 | Mm.4215 | Energy/Metabolism |
| 2984 | | | | | | |
| 2985 | H3157C09 | M. musculus aspartate aminotransferase | Mus musculus caspase 6 (Casp6), | BG076240 | Mm.28814 | Apoptosis |
| 2986 | | gene exon 10 and 3-flank | mRNA | | | |
| 2987 | H3157D01 | M. musculus aspartate aminotransferase | M. musculus aspartate aminotransferase | BG076244 | Mm.18916 | Matrix/Structural |
| 2988 | | gene exon 10 and 3-flank | gene exon 10 and 3-flank | | | Proteins |
| 2989 | H3157D12 | microsomal glutathione S-transferase 3 | Homo sapiens microsomal glutathione | BG088778 | Mm.29823 | Energy/Metabolism |
| 2990 | | (MGST3), | S-transferase 3 (MGST3), mRNA | | | |
| 2991 | H3157E04 | “Mus musculus phosphatidylinositol 3- | | BG088781 | Mm.41943 | Signal Transduction |
| 2992 | | kinase, catalytic, alpha polypeptide | | | | |
| | | (Pik3ca), mRNA” | | | | |
| 2993 | H3157E05 | solute carrier family 30 (zinc | Mus musculus solute carrier family 30 | BG076257 | Mm.27801 | Energy/Metabolism |
| 2994 | | transporter), member 4 (Slc30a4), | (zinc transporter), member 4 (Slc30a4), | | | |
| | | | mRNA | | | |
| 2995 | H3157H01 | sterol O-acyltransferase 1 (Soat1), | Mus musculus sterol O-acyltransferase 1 | BG088808 | Mm.28099 | Matrix/Structural |
| 2996 | | | (Soat1), mRNA | | | Proteins |
| 2997 | H3158B04 | ornithine decarboxylase antizyme | Mus musculus ornithine decarboxylase | BG088828 | Mm.6775 | Energy/Metabolism |
| 2998 | | inhibitor (Oazi), | antizyme inhibitor (Oazi), mRNA | | | |
| 2999 | H3158C04 | Mus musculus maternal embryonic | | BG076315 | Mm.1178 | Matrix/Structural |
| 3000 | | message 3 (Mem3), mRNA | | | | Proteins |
| 3001 | H3158C07 | | | | | Heat Shock/Stress |
| 3002 | | | | | | |
| 3003 | H3158E03 | methylenetetrahydrofolate | Mus musculus | BG076333 | Mm.443 | Energy/Metabolism |
| 3004 | | dehydrogenase (NAD+ dependent), | methylenetetrahydrofolate | | | |
| | | methenyltetrahydrofolate | dehydrogenase (NAD+ dependent), | | | |
| | | cyclohydrolase (Mthfd2), | methenyltetrahydrofolate | | | |
| | | | cyclohydrolase (Mthfd2), mRNA | | | |
| 3005 | H3158F09 | cDNA: FLJ22903 fis, clone KAT05624 | Homo sapiens cDNA: FLJ22903 fis, | BG088873 | Mm.20841 | Energy/Metabolism |
| 3006 | | | clone KAT05624 | | | |
| 3007 | H3158F10 | “Mus musculus Ccth gene for | | BG076350 | Mm.28037 | Heat Shock/Stress |
| 3008 | | chaperonin containing TCP-1 eta | | | | |
| | | subunit, complete cds” | | | | |
| 3009 | H3158G12 | “Mus musculus metallothionein-like 5, | | BG076362 | Mm.56287 | Heat Shock/Stress |
| 3010 | | testis-specific (tesmin) (Mtl5), mRNA” | | | | |
| 3011 | H3158H01 | “Mus musculus protein phosphatase 5 | | BG076363 | Mm.3294 | Signal Transduction |
| 3012 | | (PP5) mRNA, complete cds” | | | | |
| 3013 | H3159A03 | Mm.10331 | | | Mm.10331 | Apoptosis |
| 3014 | | | | | | |
| 3015 | H3159C05 | “Mus musculus Rab3D (rab3d) gene, | | BG076387 | Mm.29968 | Signal Transduction |
| 3016 | | complete cds” | | | | |
| 3017 | H3159D05 | “Homo sapiens phosphorylase kinase, | | BG088924 | Mm.28827 | Signal Transduction |
| 3018 | | beta (PHKB), mRNA” | | | | |
| 3019 | H3159F12 | “Mus musculus phosphofructokinase-1 | | BG088948 | Mm.26550 | Signal Transduction |
| 3020 | | A isozyme (Pfka) mRNA, complete | | | | |
| | | cds” | | | | |
| 3021 | H3159G05 | glutathione S-transferase, mu 2 (Gstm2), | Mus musculus glutathione S-transferase, | BG088952 | Mm.14601 | Energy/Metabolism |
| 3022 | | | mu 2 (Gstm2), mRNA | | | |
| 3023 | P1G4 | Ant 1 | | | | |
| 3024 | mFRDA | Frataxin | | NM_008044 | | Energy/Metabolism |
| 3025 | mSOD2 | Mn SOD (SOD2) | | NM_013671 | | Energy/Metabolism |
| 3026 | P1G9 | mtDNA-12s rRNA | | | | |
| 3027 | P1G10 | mtDNA-16s rRNA | | | | |
| 3028 | P1H10 | mtDNA-ATPase 6 | | | | |
| 3029 | P1H11 | mtDNA-ATPase 8 | | | | |
| 3030 | P1G11 | mtDNA-COX 1 | | | | |
| 3031 | P1G12 | mtDNA-COX 2 | | | | |
| 3032 | P1H1 | mtDNA-COX 3 | | | | |
| 3033 | P1H9 | mtDNA-Cyt b | | | | |
| 3034 | P1H2 | mtDNA-NADH 1 | | | | |
| 3035 | P1H3 | mtDNA-NADH 2 | | | | |
| 3036 | P1H4 | mtDNA-NADH 3 | | | | |
| 3037 | P1H5 | mtDNA-NADH 4 | | | | |
| 3038 | P1H6 | mtDNA-NADH 4L | | | | |
| 3039 | P1H7 | mtDNA-NADH 5 | | | | |
| 3040 | P1H8 | mtDNA-NADH 6 | | | | |

[0084] TABLE 5

| | | | IMAGE Clone | | Res. |
|---|---|---|---|---|---|
| Num | Gene | Genbank Acc. # | ID | Unigene Cluster | Gen.Clone |
| 1 | mtDNA-12s rRNA | V00711 | In House-Clone | | |
| 2 | mtDNA-16s rRNA | V00711 | In House-Clone | | |
| 3 | mtDNA-ATPase 6 | V00711 | In House-Clone | | |
| 4 | mtDNA-ATPase 8 | V00711 | In House-Clone | | |
| 5 | mtDNA-COX 1 | V00711 | In House-Clone | | |
| 6 | mtDNA-COX 2 | V00711 | In House-Clone | | |
| 7 | mtDNA-COX 3 | V00711 | In House-Clone | | |
| 8 | mtDNA-Cyt b | V00711 | In House-Clone | | |
| 9 | mtDNA-NADH 1 | V00711 | In House-Clone | | |
| 10 | mtDNA-NADH 2 | V00711 | In House-Clone | | |
| 11 | mtDNA-NADH 3 | V00711 | In House-Clone | | |
| 12 | mtDNA-NADH 4 | V00711 | In House-Clone | | |
| 13 | mtDNA-NADH 4L | V00711 | In House-Clone | | |
| 14 | mtDNA-NADH 5 | V00711 | In House-Clone | | |
| 15 | mtDNA-NADH 6 | V00711 | In House-Clone | | |
| 16 | 2′-5′)oligoadenylate synthetase 1 | X04958, | AI449562 | Mm.14301 | 577664 |
| | | M33863 | | | |
| 17 | 14-3-3 protein beta | AF058797.1 | AA624796 | Mm.34454 | 1039350 |
| 18 | 14-3-3 protein epsilon | D87663.1 | AA240827 | Mm.678 | 670982 |
| 19 | 14-3-3 protein eta | U57311 | AI325059 | Mm.3308 | 558536 |
| 20 | 14-3-3 protein gamma | AF058799 | | Mm.10802 | 464892 |
| 21 | 14-3-3 protein theta (tau) | U57312 | AA422980 | Mm.14722 | 803843 |
| 22 | 14-3-3 protein zeta | U79231 | AA671451 | Mm.3360 | 1039129 |
| 23 | 25-hydroxyvitamin D3 24-hydroxylase | D49438 | AA240836 | Mm.6575 | 657172 |
| | precursor | | | | |
| 24 | 25-hydroxyvitamin D3 24-hydroxylase | D49438 | AI226268 | Mm.6575 | 658678 |
| | precursor | | | | |
| 25 | 2-amino-3ketobutyrate-coenzyme A ligase | AF093403 | AI037094 | Mm.18618 | 315143 |
| 26 | 2-oxoglutarate dehydrogenase E1 | U02971 | W98443 | | 424460 |
| | component | | | | |
| 27 | 3,2-trans-enoyl-CoA isom, mito precursor | Z14049 | AI194961 | | 1886651 |
| 28 | 38g cent. | | In House-Clone | | |
| 29 | 3-beta hydroxy-5-ene steroid | M27137 | AA274685 | | 766591 |
| | dehydrogenase type I | | | | |
| 30 | 3-beta hydroxy-5-ene steroid | M75886 | AI266804 | Mm.30433 | 1891212 |
| | dehydrogenase type II | | | | |
| 31 | 3-beta hydroxy-5-ene steroid | M77015 | AA209060 | Mm.335 | 676577 |
| | dehydrogenase type III | | | | |
| 32 | 3-methyl-2-oxobutanoate dehydrogenase | L16992 | | Mm.12819 | 422840 |
| | (lipoamide) | | | | |
| 33 | 41.2a cent. | | In House-Clone | | |
| 34 | 44b cent. | | In House-Clone | | |
| 35 | 45.2b cent. | | In House-Clone | | |
| 36 | 55e cent. | | In House-Clone | | |
| 37 | 5-aminolevulinate synthase precursor | M15268 | AA189529 | Mm.1217 | 635215 |
| | (EST) | | | | |
| 38 | 65c cent. | | In House-Clone | | |
| 39 | 66a cent. | | In House-Clone | | |
| 40 | 67 cent. | | In House-Clone | | |
| 41 | a-amylase | V00719 | AI325237 | Mm.7074 | 608852 |
| 42 | acatyl-CoA acetyltransferase 1 | L42293 | | Mm.28099 | 472233 |
| 43 | acatyl-CoA acetyltransferase 2 | AF078751 | AA239043 | | 694062 |
| 44 | Aconitase (iron responsive element) | X61147 | AA212704 | | 677092 |
| 45 | Aconitase (iron responsive element) | X61147 | AA238899 | | 697949 |
| 46 | Acyl-CoA dehyd, med-chain specific | U07159 | AA104184 | Mm.10530 | 568149 |
| | precursor (MCAD) | | | | |
| 47 | Acyl-CoA dehyd, short-chain specific | L11163 | AI050239 | Mm.18759 | 1379035 |
| | precursor | | | | |
| 48 | Acyl-CoA dehyd, very-long-chain specific | U41497 | AA250410 | Mm.18630 | 670916 |
| | precursor | | | | |
| 49 | Acyl-CoA dehydrog, long-chain spec. | U21489 | AA254905 | Mm.2445 | 719580 |
| | precursor (LCAD) | | | | |
| 50 | adapt | | In House-Clone | | |
| 51 | Adenine nucleotide translocator 2, | | AA033138.1 | | 465520 |
| | fibroblast (Ant2) | | | | |
| 52 | adenylate kinase isoenzyme 2 (EST) | AI155541 | AA061587 | Mm.29460 | 483322 |
| 53 | Adenylosuccinate synthase | | AA388461 | | 749837 |
| 54 | adenylyl cyclase type VII | U12919 | W65619 | | 387280 |
| 55 | ADP, ATP carrier protein, fibroblast | U27316 | | Mm.658 | 585992 |
| | isoform 2 (ant2) | | | | |
| 56 | ADP, ATP carrier protein, heart isoform T1 | U27315 | AA717872 | Mm.16228 | 1152250 |
| 57 | adrenodoxin precursor | L29123 | AA461849 | Mm.1061 | 851558 |
| 58 | Alcohol dehydrogenase 5 | | AA183192 | | 636207 |
| 59 | Alcohol dehydrogenase I | | AA221141 | | 695105 |
| 60 | Aldehyde dehydrogenase | U07235 | AA122975 | | 579570 |
| 61 | aldehyde dehydrogenase (NAD+) 2 | U07235 | AI503977 | Mm.2621 | 1001020 |
| | precursor | | | | |
| 62 | Alpha-1 protease inhibitor | U38477 | AA212578 | Mm.16672 | 676745 |
| 63 | Ant 1 | | In House-Clone | | |
| 64 | Antioxidant protein 1 | M28723 | W91307 | | 423832 |
| 65 | Antioxidant protein 1 | M28723 | | Mm.29821 | 599017 |
| 66 | Antioxidant protein-2 (AO2) | | AA243957 | Mm6587 | 694088 |
| 67 | Apoptosis inhibitor 2 | | AA144490 | | 597715 |
| 68 | Apoptosis inhibitor 3 | | AA097958 | | 550702 |
| 69 | apoptosis regulator BAX, membrane | L22472 | AI323521 | Mm19904 | 557643 |
| | isoform alpha | | | | |
| 70 | Apoptosis-inducing factor | AF100927 | AA866777 | | 1434491 |
| 71 | ASC | | In House-Clone | | |
| 72 | ATP synth lipid-binding protein P1 | L19737 | AI481739 | Mm.258 | 888863 |
| | precursor (subunit 9) | | | | |
| 73 | ATP synthase A Channel | AA106406 | AA106406 | Mm.5293 | 519329 |
| 74 | ATP synthase F0 component | L19737 | AA139793 | | 580898 |
| 75 | ATP synthase F0 component | | AA269701 | | 735887 |
| 76 | ATP/GTP binding protein | | AA184876 | | 642977 |
| 77 | ATPase, Ca++ transporting, cardiac | | W34420.1 | | 318735 |
| | muscle, fast twitch 1 | | | | |
| 78 | ATPase, Ca2+ transporting, heart | | W34420 | | 318735 |
| 79 | ATPase-like vacule proton channel | | AA276030 | | 776055 |
| 80 | ATP-binding cassette transporter 7 | U43892 | AU019072 | Mm.4739 | 1920872 |
| 81 | Bcl-2 protein | U10102 | AA051441 | | 478723 |
| 82 | Branched chain alpha ketoacid dehydrog. | | | Mm.8903 | 578018 |
| | Kinase | | | | |
| 83 | branched chain alpha-ketoacid dehyd chain | L47335 | | Mm.25848 | 314098 |
| | E1-alpha | | | | |
| 84 | Branched-chain a-ketoacid dehydrog. E1b | | AA050586 | | 476163 |
| 85 | Branched-chain amino transferase I | | AA003372 | | 426976 |
| 86 | BZP | | In House-Clone | | |
| 87 | C II 3 | | In House-Clone | | |
| 88 | C IV is | | In House-Clone | | |
| 89 | Calcium channel, voltage-dependent, L | | AA511037.1 | | 890932 |
| | type, alpha 2 delta subunit | | | | |
| 90 | calm 1 | | In House-Clone | | |
| 91 | Calmodulin 3 | | AA109041.1 | | 571789 |
| 92 | carbonate dehydratase, hepatic | X51971 | AI256540 | Mm.35538 | 1889415 |
| 93 | Carbonic Anhydrase IV | U37091 | AA71129 | Mm.1614 | 1167078 |
| 94 | carbonyl reductase (NADPH) - mouse | X07411, | W11423 | Mm.21454 | 317572 |
| | | D26123 | | | |
| 95 | carnitine O-acetyltransferase (carnitine | X85983 | AI528757 | Mm.20396 | 602213 |
| | acetylase) | | | | |
| 96 | carnitine O-palmitoyltransferase II | U01163 | | Mm.29499 | 580316 |
| | precursor | | | | |
| 97 | Carnitine palmitoyltransferase 2 | | | Mm.29499 | 580316 |
| 98 | Caspase 2 | | AA200808 | | 639403 |
| 99 | Caspase I | | AA098139 | | 550766 |
| 100 | Catalase | | AA239490 | Mm 4215 | 678773 |
| 101 | CCAAT/enhancer binding protein | | AA271223.1 | | 738252 |
| | C/EBP), alpha | | | | |
| 102 | CEBP | | In House-Clone | | |
| 103 | Cellular apoptosis succep. Protein | | AA471761 | | 874148 |
| 104 | chaperonin-10 | U09659 | | Mm.12970 | 422572 |
| 105 | CI 18K | | In House-Clone | | |
| 106 | CI B8 | | In House-Clone | | |
| 107 | col 1 | | In House-Clone | | |
| 108 | col 3 | | In House-Clone | | |
| 109 | coproporphyrinogen III oxidase precursor | D16333 | W71884 | Mm.35820 | 390487 |
| 110 | coproporphyrinogen oxidase | D16333 | AA108600 | | 570602 |
| 111 | coproporphyrinogen oxidase | D16333 | AA259342 | | 734795 |
| 112 | coproporphyrinogen oxidase | D16333 | W53951 | | 367358 |
| 113 | Core binding factor beta | | AA146442.1 | | 596552 |
| 114 | creatine kinase | Z13968, | AA690010 | Mm.970 | 1167886 |
| | | Z13969 | | | |
| 115 | Creatine Kinase, muscle | X03233 | AA166212 | Mm.2375 | 608246 |
| 116 | Creatine kinase-complete | M74149 | AA270310 | Mm.16831 | 736251 |
| 117 | Creatine kinase-mitochondrial | Z13968 | AI528837 | Mm.970 | 607301 |
| 118 | cyt C oxydase polypeptide VIIa- | X58486 | AA960158 | Mm.2151 | 1248366 |
| | liver/heart precursor | | | | |
| 119 | cyto C oxydase polypeptide VIa-heart | U08439 | AA415934 | Mm.21050 | 846138 |
| | precursor | | | | |
| 120 | cyto C oxydase polypeptide VIa-liver | L06465 | | Mm.19094 | 533628 |
| | precursor | | | | |
| 121 | cytochrome c oxidase chain IV precursor | X54691, | AA260009 | Mm.2136 | 746546 |
| | | M37829 | | | |
| 122 | cytochrome c oxidase chain Va precursor | X15963 | AI131665 | Mm.360 | 1884978 |
| 123 | cytochrome c oxidase chain Vb precursor | X53157 | AI035302 | Mm.16769 | 1432845 |
| 124 | cytochrome c oxidase chain VIb | NM_001863 | AI503861 | | 991287 |
| | (HUMAN) | | | | |
| 125 | cytochrome c oxidase chain VIc | M20153 | AA062417 | | 516889 |
| 126 | cytochrome c oxidase chain VIIc | X52940 | AA031250 | Mm.14831 | 464966 |
| 127 | cytochrome c oxidase chain VIII | U37721 | | Mm.14022 | 481408 |
| 128 | Cytochrome C oxidase sub VII | | AA050684 | | 476180 |
| 129 | cytochrome C oxydase polypeptide VIII-H | U15541 | AI323348 | Mm.3841 | 463967 |
| | precursor | | | | |
| 130 | cytochrome C, somatic | X01756 | AA221965 | Mm.35389 | 658678 |
| 131 | cytochrome C-type heme lyase (CCHL) | U36778 | | Mm.3988 | 400735 |
| 132 | cytochrome-b5 reductase (HUMAN) | NM_000398 | AA816039 | | 1120651 |
| 133 | CYTOSOLIC BRANCH CHAIN | | AA286063 | | 776036 |
| | AMINOTRANSFERASE | | | | |
| 134 | DD 43 | | In House-Clone | | |
| 135 | DD 47 | | In House-Clone | | |
| 136 | DD 48 | | In House-Clone | | |
| 137 | DD 53 | | In House-Clone | | |
| 138 | DD 64 | | In House-Clone | | |
| 139 | DD 68 | | In House-Clone | | |
| 140 | DD 69 | | In House-Clone | | |
| 141 | DD 73 | | In House-Clone | | |
| 142 | DD 83 | | In House-Clone | | |
| 143 | DD 84 | | In House-Clone | | |
| 144 | DD10a | | In House-Clone | | |
| 145 | DD11b | | In House-Clone | | |
| 146 | DD14 | | In House-Clone | | |
| 147 | DD15c | | In House-Clone | | |
| 148 | DD16c | | In House-Clone | | |
| 149 | DD17c | | In House-Clone | | |
| 150 | DD19a | | In House-Clone | | |
| 151 | DD23ba | | In House-Clone | | |
| 152 | DD24d | | In House-Clone | | |
| 153 | DD25c | | In House-Clone | | |
| 154 | DD26f | | In House-Clone | | |
| 155 | DD2a | | In House-Clone | | |
| 156 | DD33a/pgf | | In House-Clone | | |
| 157 | DD39 | | In House-Clone | | |
| 158 | DD4c | | In House-Clone | | |
| 159 | DD7a | | In House-Clone | | |
| 160 | defender against cell death 1 | | AA033006 | | 464622 |
| 161 | DiGeorge syndrome chromosome region 6 | | W54234.1 | | 356181 |
| 162 | dihydrolipoamide dehydrogenase (E3) | J03490 | AA548170 | Hs.74635 | 994825 |
| | (HUMAN) | | | | |
| 163 | dihydrolipoamide transacylase precursor | L42996 | AA254971 | Mm.3636 | 719973 |
| 164 | Dimethyl glycine dehydrogenase | | AA288418 | | 748958 |
| 165 | DNA polymerase gamma | U53584 | | Mm.3616 | 575332 |
| 166 | Dynamin | | AA266438 | | 317587 |
| 167 | Dynamin 2 | | W13111 | | 457445 |
| 168 | E1B 19k/Bcls-binding prot. Homolog | | AA105295 | | 571367 |
| | (NIP3) | | | | |
| 169 | ER V | | In House-Clone | | |
| 170 | ERV-1 | U40494 | AI413376 | Mm.28124 | 367232 |
| 171 | EST highly similar to S-100 prot a-chain | | AA466432 | | 872869 |
| 172 | ESTs | | AA253853.1 | | 660997 |
| 173 | ESTs | | AA268402.1 | | 721970 |
| 174 | ESTs | | W14142.1 | | 329863 |
| 175 | ESTs, Highly similar to CREATINE | | AA038095.1 | | 472860 |
| | KINASE, SARCOMERIC MITO. | | | | |
| | PRECUR. | | | | |
| 176 | ESTs, Highly similar to CREATINE | | AI322288.1 | | 336085 |
| | KINASE, SARCOMERIC MITO. | | | | |
| | PRECUR. | | | | |
| 177 | ESTs, Highly similar to | | W13931.1 | | 330218 |
| | DERMATOPONTIN [Bos taurus] | | | | |
| 178 | ESTs, Highly similar to MATERNAL | | AA104976.1 | | 533314 |
| | EFFECT PROTEIN STAUFEN | | | | |
| 179 | ESTs, Highly similar to NADH- | | AA288040.1 | | 748891 |
| | UBIQUINONE OXIDOREDUCTASE 13 | | | | |
| | KD-B SUB | | | | |
| 180 | ESTs, Highly similar to NADH- | | AA222463.1 | | 671212 |
| | UBIQUINONE OXIDOREDUCTASE | | | | |
| | SGDH SUB PREC. | | | | |
| 181 | ESTs, Highly similar to NUCLEAR | | AA060802.1 | | 482952 |
| | FACTOR NF-KAPPA-B P100 SUBUNIT | | | | |
| 182 | ESTs, Highly similar to PINCH | | AA289280.1 | | 790449 |
| | PROTEIN | | | | |
| 183 | ESTs, Highly similar to PTERIN-4- | | W14332.1 | | 331681 |
| | ALPHA-CARBINOLAMINE | | | | |
| | DEHYDRATASE | | | | |
| 184 | ESTs, Highly similar to PUTATIVE | | W66757.1 | | 387449 |
| | REGULATORY PROTEIN TSC-22 | | | | |
| 185 | ESTs, Highly similar to SUCCINATE | | AA108475.1 | | 572339 |
| | DEHYDROGENASE | | | | |
| 186 | ESTs, Highly similar to (define not | | AA190123.1 | | 642467 |
| | available 4588044) | | | | |
| 187 | ESTs, Highly similar to putative | | AA184876.1 | | 642977 |
| | ATP/GTP-binding protein | | | | |
| 188 | ESTs, Weakly similar to (define not | | AA467585.1 | | 833160 |
| | available 3668141) [H. sapiens] | | | | |
| 189 | ESTs, Weakly similar to survival motor | | AA538419.1 | | 932748 |
| | neuron [M. musculus] | | | | |
| 190 | ESTs, Weakly similar to vesicle membrane | | AA259674.1 | | 735186 |
| | protein | | | | |
| 191 | Excitatory amino acid transporter 3 | D43797 | AA065502 | Mm.24741 | 524046 |
| 192 | ferredoxin--NADP+ reductase precursor | D49920 | AA879949 | Mm.4719 | 1230740 |
| 193 | ferrochelatase precursor | M59288 | | Mm.1070 | 635652 |
| 194 | Friedreich ataxia | S75712 | AA930748 | | 1150363 |
| 195 | Fructose 1-6 bis-phosphate | D42083 | AI385602 | Mm.2974 | 336727 |
| 196 | Fructose bis-phosphate aldolase | W53351 | AI553136 | Mm.7729 | 902910 |
| 197 | Fructose Bisphosphate aldolase A | Y00516 | AA518639 | | 903419 |
| 198 | Fuzzy onion homolog (mouse) | | AA674474 | | 1093002 |
| 199 | GAMMA-ADAPTIN | | AA238435.1 | | 693837 |
| 200 | GAPD | | In House-Clone | | |
| 201 | GILZ | | In House-Clone | | |
| 202 | Gluamate receptor, ionotropic, kainate 5 | | AA261334 | Mm.2879 | 733368 |
| | (gamma 2) | | | | |
| 203 | Gluamate receptor, ionotropic, NMDA1 | | W44130 | Mm.3292 | 354244 |
| | (Zeta 1) | | | | |
| 204 | Gluamate receptor, ionotropic, NMDA2C | | AI256808 | Mm.39090 | 1852361 |
| | epsilon 3) | | | | |
| 205 | Glucose dependent insulinotropic | U34295 | AA871367 | Mm.5115 | 1096156 |
| | polypeptide | | | | |
| 206 | Glucose Phospahate Isomerase I complex | M14220 | AA276216 | | 776210 |
| 207 | Glucose Phospahate Isomerase I complex | M14220 | W29397 | | 337413 |
| 208 | Glucose-6-phosphate isomerase | L09104 | AI327180 | Mm.589 | 437357 |
| 209 | glutamate dehydrogenase (NAD(P)+) | X57024 | AA543797 | Mm.10600 | 949005 |
| | precursor | | | | |
| 210 | glutamate oxaloacetate transaminase-2 | X06917, | | Mm.18916 | 617490 |
| | | J02622 | | | |
| 211 | Glutaryl-CoA dehydrogenase precursor | U18992 | | Mm.2475 | 573351 |
| | (GCD) | | | | |
| 212 | Glutathione peroxidase-3 (plasma Gpx) | U13705 | AA097557 | Mm7156 | 552393 |
| 213 | Glutathione peroxidase-4 (phospholipid | | AA034666 | Mm2400 | 466963 |
| | Gpx) | | | | |
| 214 | Glutathione peroxidase-heart isoform | AF045769.1 | AI327053 | Mm.2400 | 420345 |
| | (Gpx4) | | | | |
| 215 | Glutathione peroxidase-plasma isoform | U13705.1 | AI042912 | Mm.7156 | 1432410 |
| 216 | Glyceraldehyde 3-phosphate | | AA122891 | | 579715 |
| | dehydrogenase | | | | |
| 217 | Glycerol 3-phosphate acyltransferase | M77003 | AA209041 | | 676437 |
| 218 | Glycerophosphate dehydrogenase | M13366 | AI414023 | Mm.10669 | 303389 |
| 219 | Glycogen Phosphorylase (RAT) | J03080 | AA240684 | | 656882 |
| 220 | GP4 | | In House-Clone | | |
| 221 | Gpx | | In House-Clone | | |
| 222 | GTP2 | | In House-Clone | | |
| 223 | GTP-binding protein | | AA509565 | | 890444 |
| 224 | H+-transporting ATP synthase chain alpha | L01062 | AI573940 | Mm.4069 | 1920315 |
| 225 | H+-transporting ATP synthase chain beta | AF030559 | AI452208 | Mm.17869 | 576006 |
| 226 | H+-transporting ATP synthase chain delta | AA940343 | AA896697 | Mm.22514 | 1279053 |
| | (EST) | | | | |
| 227 | H+-transporting ATP synthase chain e | U59283 | AI115240 | | 1885128 |
| 228 | H+-transporting ATP synthase chain e | U59283 | M481625 | | 876416 |
| 229 | H+-transporting ATP synthase chain | U43893 | AA210528 | | 640931 |
| | gamma | | | | |
| 230 | heat shock protein 60 precursor | X55023, | AA154729 | Mm.1777 | 540881 |
| | | X53584 | | | |
| 231 | heat shock protein 70 precursor | D11089 | AI132204 | Mm.2849 | 1481709 |
| 232 | heat shock protein, 70 K (hsp68) | M12573 | AA647374 | Mm.6388 | 1108306 |
| | (fragment) | | | | |
| 233 | Heat shock protein, 84 kDa 1 | M18186 | | Mm.2180 | 538585 |
| 234 | Hexokinase | | W11571 | | 318642 |
| 235 | Hexokinase | | W74835 | | 389177 |
| 236 | hexokinase I (3′-seq) | J05277 | AI661880 | Mm.5290 | 717383 |
| 237 | hexokinase I (5′-seq) | J05277 | AA197916 | Mm.5290 | 654873 |
| 238 | high mobility group protein homolog | | AA048831.1 | | 478865 |
| | HMG4 (Hmg4) mRNA, complete cds | | | | |
| 239 | HK-40s Ribosomal protein S15 | | AA033398 | | 466295 |
| 240 | HK-40s Ribosomal protein S4 | | AA000082 | | 425352 |
| 241 | HK-A111Acient ubiquinating protein | | W82989 | | 405768 |
| 242 | HK-A16060s Ribosomal protein L15 | | AA068842 | | 532770 |
| 243 | HK-A17360s Ribosomal protein L3 | | AA108363 | | 570533 |
| 244 | HK-A21060s Ribosomal protein L1A | | AA170607 | | 619006 |
| 245 | HK-A216RNA splicing protein | | AA183061 | | 636766 |
| 246 | HK-A262E2F transcription factor | | AA396123 | | 751755 |
| 247 | HK-A272Capping protein | | AA414612 | | 779754 |
| 248 | HK-A316Actin-gamma (smooth muscle) | M26689 | AA710883 | Mm.16562 | 1166855 |
| 249 | HK-A97Hypozanthine phosphoribosyl | J00423 | W48168 | Mm.18675 | 355084 |
| | transferase | | | | |
| 250 | HK-Actin-alpha (skeletal muscle) | M12347 | AI035279 | Mm.4581 | 1480709 |
| 251 | HK-Actin-gamma | M21495 | AI314957 | Mm.29913 | 192859 |
| 252 | HK-Alkaline Phosphatase | | AA032457 | | 465052 |
| 253 | HK-b-actin | X03672 | AA079937 | Mm.297 | 536615 |
| 254 | HK-calcium binding protein Cab45 | U45977 | AI266799 | Mm.30149 | 1891202 |
| 255 | HK-DNA ligase I | | W66626 | | 388245 |
| 256 | HK-Glyceraldehyde 3-phosphate | W14827 | AA119563 | Mm.5289 | 538210 |
| | dehydrogenase (G3PDH) | | | | |
| 257 | HK-Glyceraldehyde phosphate | M32599 | AA466618 | Mm.5289 | 817984 |
| | dehydrogenase | | | | |
| 258 | HK-HPRT | | In House-Clone | | |
| 259 | HK-Hypozanthine phosphoribosyl | J00423 | AI256193 | Mm.18675 | 1890233 |
| | transferase | | | | |
| 260 | HK-Murine ornithine decarboxylase | M10624 | AI325192 | Mm.15259 | 608003 |
| 261 | HK-Myosin 1 | L00923 | AI098184 | Mm.3390 | 1481939 |
| 262 | HK-Phospholipase A2 (14-3-3 zeta/delta) | D78647 | AA1714341 | Mm.3360 | 617315 |
| 263 | HK-Ribosomal Protein S29 | L31609 | AA032465 | Mm.35816 | 465138 |
| 264 | HK-Ubiquitin | X51703 | AI181949 | Mm.235 | 1451597 |
| 265 | House mouse; Musculus domesticus | | W82212.1 | | 403728 |
| | mRNA for LN1, complete cds | | | | |
| 266 | Huntingtin | AI876894 | AI876894 | — | 1922060 |
| 267 | hydroxymethylglutaryl-CoA lyase | S65036 | AA838929 | | 1261134 |
| 268 | hydroxymethylglutaryl-CoA synthase, | U12790, | | Mm.10633 | 518481 |
| | mitochondrial | U12791 | | | |
| 269 | IG ALPHA CHAIN C REGION | | AA098196.1 | | 551003 |
| 270 | IMAGE EST | | AA009059.1 | | 441176 |
| 271 | IMAGE EST | | AA028306 | | 464099 |
| 272 | IMAGE EST | | AA035899.1 | | 468817 |
| 273 | IMAGE EST | | AA051664.1 | | 479709 |
| 274 | IMAGE EST | | AA118290 | | 574435 |
| 275 | IMAGE EST | | AA200984.1 | | 639212 |
| 276 | IMAGE EST | | AA203878 | | 640734 |
| 277 | IMAGE EST | | AA215024 | | 652207 |
| 278 | IMAGE EST | | AA221250 | | 670393 |
| 279 | IMAGE EST | | AA245545 | | 699280 |
| 280 | IMAGE EST | | AA250652 | | 697537 |
| 281 | IMAGE EST | | AA266097.1 | | 716941 |
| 282 | IMAGE EST | | AA275684 | | 775722 |
| 283 | IMAGE EST | | AA388512 | | 790857 |
| 284 | IMAGE EST | | AA466026.1 | | 809016 |
| 285 | IMAGE EST | | AA519027.1 | | 904900 |
| 286 | IMAGE EST | | W08090.1 | | 331768 |
| 287 | IMAGE EST | | W09924 | | 315773 |
| 288 | IMAGE EST | | W09924.1 | | 315773 |
| 289 | IMAGE EST | | W15031 | | 330502 |
| 290 | IMAGE EST | | W41309.1 | | 351420 |
| 291 | IMAGE EST | | W89418.1 | | 420553 |
| 292 | IMAGE EST-CCAAT enhancer binding | | AA271223 | | 738252 |
| | protein | | | | |
| 293 | IMAGE EST-Glucocorticoid-induced | | W66757 | | 387449 |
| | leucine zipper GILZ protein | | | | |
| 294 | IMAGE EST-homolog of Unc33 | | W08090 | | 331768 |
| | (C. Elegans)/Collaspin reponse mediated | | | | |
| | prot. 2 | | | | |
| 295 | IMAGE EST-sarcoplasmic creatine kinase | | W18057 | | 336085 |
| 296 | IMAGE EST-Sim to gamma sarcoglycan | | W41309 | | 351420 |
| 297 | IMAGE EST-yeast bile transporter | | AA473289 | | 803488 |
| 298 | Interferon gamma receptor | | AA541842.1 | | 920516 |
| 299 | Interleukin 1 receptor-associated kinase | | AA276835.1 | | 777580 |
| 300 | isocitrate dehydrogenase (NADP) | U51167 | | Mm.2966 | 571468 |
| 301 | Kin 17 | | In House-Clone | | |
| 302 | Lactate Dehydrogenase- | M27554 | AA880398 | | 1277670 |
| 303 | Lactate Dehydrogenase-A4 | M17516 | AI506641 | Mm.26504 | 1024774 |
| 304 | Lactate Dehydrogenase-sperm specific | M17587, | AA110449 | Mm.16563 | 516582 |
| | | L10389 | | | |
| 305 | M. musculus mRNA for fibromodulin | | W63981.1 | | 374228 |
| 306 | M. musculus mRNA for GTP-binding | | AA020462.1 | | 455401 |
| | protein | | | | |
| 307 | MAD homolog 4 (Drosophila) | | AA030901.1 | | 466551 |
| 308 | Malate dehydrogenase (cyto) | | W13686 | | 318346 |
| 309 | Malate dehydrogenase (mito) | M16229 | AA266087 | | 717095 |
| 310 | malate dehydrogenase precursor, | X07295, | | Mm.21743 | 407143 |
| | mitochondrial | M16229 | | | |
| 311 | MAP KINASE PHOSPHATASE-1 | | AA125367.1 | | 575665 |
| 312 | Maternal embryonic message 3 | | AA388122.1 | | 775464 |
| 313 | MCK | | In House-Clone | | |
| 314 | mDP 6 | | In House-Clone | | |
| 315 | metal response element DNA-binding | | AA545607.1 | | 945218 |
| | protein M96 mRNA, complete cds | | | | |
| 316 | methylenetetrahydrofolate dehydrogenase | J04627 | | Mm.443 | 440345 |
| | (NAD+) | | | | |
| 317 | methylmalonyl-CoA mutase alpha chain | X51941 | | Mm.4299 | 571282 |
| | precursor | | | | |
| 318 | Microtubule-associated protein 4 | | AA003769.1 | | 437523 |
| 319 | Mito matrix prot P1 precursor (hsp60) | | AA184322 | | 633625 |
| 320 | Mitochondrial LON protease | AA061310 | AA061310 | — | 514859 |
| 321 | mitochondrial transcription factor A - | U57939 | | Mm.276 | 539693 |
| | mouse | | | | |
| 322 | mitochondrial uncoupling protein | M21247 | AI131780 | Mm.4177 | 1498957 |
| 323 | monoamine oxidase A - mouse | S78615 | AI643185 | | 864614 |
| 324 | Mouse breast heat shock 73 prot (hsc73) | M19141 | | Mm.2944 | 538418 |
| 325 | Mouse calcineurin catalytic subunit | | AA245461.1 | | 699236 |
| | mRNA, complete cds | | | | |
| 326 | Mouse Circadian output locomotor cycles | AF000998 | AI156715 | Mm.3552 | 1494023 |
| | kaput | | | | |
| 327 | Mouse heatshock protein 27 | U03560.1 | AA596241 | Mm.13849 | 1052188 |
| 328 | Mouse heatshock protein 86 | J04633 | AI649095 | | 1970053 |
| 329 | Mouse med. Chain acyl-CoA | U07159 | AA061679 | | 483333 |
| | dehydrogenase | | | | |
| 330 | Mouse mHox protein | L06502 | W17990 | Mm.3869 | 335936 |
| 331 | Mouse Skd3 mRNA | U09874 | | Mm.3990 | 602340 |
| 332 | mRNA for sarco/endoplasmic reticulum | | AA222567.1 | | 695695 |
| | Ca2+-ATPase (SERCA2) | | | | |
| 333 | mTF 1 | | In House-Clone | | |
| 334 | Mus musculus Balb/c zinc finger protein | | W11161.1 | | 316427 |
| | PZF (Pzf) mRNA, complete cds | | | | |
| 335 | Mus musculus calcium-binding protein | | AA466432.1 | | 872869 |
| | S100A1 mRNA, complete cds | | | | |
| 336 | Mus musculus cytoplasmic protein Ndr1 | | AA473269.1 | | 803416 |
| | (Ndr1) mRNA, complete cds | | | | |
| 337 | Mus musculus FGF-binding protein (FGF- | | AA403432.1 | | 717457 |
| | BP) mRNA, complete cds | | | | |
| 338 | Mus musculus GTP binding protein | | AA509565.1 | | 890444 |
| | (GTP2) mRNA, complete cds | | | | |
| 339 | Mus musculus hemin-sensitive initiation | | AA036546.1 | | 466971 |
| | factor 2 alpha kinase mRNA, complete cds | | | | |
| 340 | Mus musculus mRNA for glutamate | | AI043222 | Mm.42021 | 1431493 |
| | receptor channel alpha 4 subunit | | | | |
| 341 | Mus musculus mRNA for GM3 synthase, | | AA274576.1 | | 748275 |
| | complete cds | | | | |
| 342 | Mus musculus PAF acetylhydrolase | | AI324436.1 | | 536464 |
| | mRNA, complete cds | | | | |
| 343 | Mus musculus pantophysin gene, complete | | AA271505.1 | | 737944 |
| | cds | | | | |
| 344 | Mus musculus rab6/rab5-associated | | W77711.1 | | 401958 |
| | protein (rab6) mRNA, partial cds | | | | |
| 345 | Mus musculus skeletal muscle LIM | | AA047966.1 | | 477066 |
| | protein (FLH1) mRNA, complete cds | | | | |
| 346 | Mus musculus Stra13 mRNA, complete | | AA064241.1 | | 480896 |
| | cds | | | | |
| 347 | mWS3 | | In House-Clone | | |
| 348 | Myeloid cell leukemia sequence 1 | U35623, | AA387843 | Mm.1639 | 761106 |
| | | AF063886 | | | |
| 349 | Myostatin | | AA052179.1 | | 418993 |
| 350 | NAD(P)+ transhydrogenase (B-specific) | Z49204 | AI323702 | Mm.3842 | 580717 |
| | precursor | | | | |
| 351 | NADH dehydrogenase mwfe | | W83104 | | 404499 |
| 352 | NADH-ubiquinone oxidoreductase 13 kDa | L38438 | AA397301 | | 599804 |
| | subunit | | | | |
| 353 | NADH-ubiquinone oxidoreductase 13 kDa | U59509 | AA035972 | | 468848 |
| | subunit | | | | |
| 354 | NADP transhydrogenase | Z49204 | AI323702 | Mm.3842 | 580717 |
| 355 | Nitric Oxide Synthase-2 | | AA512708 | Mm2893 | 922250 |
| 356 | Nitric Oxide Synthase-3 | | AA177240 | Mm12837 | 620940 |
| 357 | Nuclear respiratory factor-1 | AF098077 | AI594316 | | 1006311 |
| 358 | Nuclear respiratory factor-2 | U20532 | | Mm.1025 | 635541 |
| 359 | ornithine carbamoyltransferase precursor | X07092 | AI266937 | Mm.2611 | 1891345 |
| 360 | ornithine-oxo-acid transaminase precursor | X64837 | AI196410 | Mm.13694 | 1887672 |
| 361 | p63a | | In House-Clone | | |
| 362 | PACD | | In House-Clone | | |
| 363 | PEBP2 | | In House-Clone | | |
| 364 | Peripheral myelin protein, 22 kDa | | AA416246.1 | | 846064 |
| 365 | peripheral-type benzodiazepine receptor 1 | U12419 | AA068577 | | 524463 |
| 366 | Perox. Proliferator receptor (PPAR) | U01841 | W34083 | Mm.3020 | 317536 |
| | Gamma | | | | |
| 367 | Peroxisomal/Mitochondrial dienoyl-CoA | | W29607 | | 338088 |
| | isomerase | | | | |
| 368 | Phosphofructokinase 1 | J03928, | AI480449 | Mm.1166 | 862787 |
| | | AF123533 | | | |
| 369 | phospholipase A2, platelet, synovial fluid | X74266 | AA871547 | Mm.4675 | 1096251 |
| 370 | phosphoprotein phosphatase | M81475 | AI449151 | Mm.1567 | 619279 |
| 371 | PMP 35 | L27842 | AI573377 | Mm.16453 | 534171 |
| 372 | probable aconitate hydratase, | AI385870 | AA275929 | Mm.30065 | 775753 |
| | mitochondrial (EST) | | | | |
| 373 | Procollagen Type 1 | | AA073604 | | 536306 |
| 374 | Procollagen, type I, alpha 1 | | AA073604.1 | | 536306 |
| 375 | Procollagen, type III, alpha 1 | | W89883.1 | | 420322 |
| 376 | Procollagen, type VI, alpha 1 | | W33786.1 | | 352450 |
| 377 | Protein Phosphatase inhibitor 2 (IPP2) | AA041826 | AA041826 | Mm.29617 | 475407 |
| 378 | protoporphyrinogen oxidase | U25114, | | Mm.4730 | 482868 |
| | | D45185 | | | |
| 379 | pyruvate carboxylase | L09192 | AI303529 | Mm.1845 | 1888741 |
| 380 | Pyruvate decarboxylase | | AA308254 | | 473778 |
| 381 | Pyruvate dehydrogenase | M76727 | AA423301 | | 820409 |
| 382 | pyruvate dehydrogenase (lipoamide) | M76728 | AI323722 | Mm.4223 | 513684 |
| 383 | pyruvate dehydrogenase (lipoamide) | M76727 | AA466268 | Mm.34775 | 888842 |
| 384 | Pyruvate dehydrogenase E1 a subunit | L13318 | AA238899 | | 888842 |
| | (human) | | | | |
| 385 | pyruvate kinase | D38379 | AI035313 | Mm.2635 | 1432851 |
| 386 | Pyruvate kinase | D63764 | AI195164 | Mm.8359 | 1886895 |
| 387 | Pyruvate kinase | | AA475121 | | 873690 |
| 388 | Pyruvate kinase-like protein | | W17814 | | 334876 |
| 389 | RAB1 | | In House-Clone | | |
| 390 | RAB1, member RAS oncogene family | | AA175510.1 | | 619501 |
| 391 | Rat NRBF1 | | AA259674 | | 735186 |
| 392 | Rnase P-complex (RS Williams work) | U31228 | AI614577 | | 523232 |
| 393 | S100 | | In House-Clone | | |
| 394 | sarc. | | In House-Clone | | |
| 395 | Sim to 6-Phosphofructo-2-kinase (human) | M19938 | AA397024 | | 693346 |
| 396 | Sim to acetyl CoA acetyl transferase (hum) | D90228 | AA272067 | | 761668 |
| 397 | Sim to acetyl Coenzyme A synthetase | | AA109675 | | 570550 |
| 398 | Sim to acetyl Coenzyme A synthetase | | AA537637 | | 949423 |
| 399 | Sim to a-ketoglutarate (hum) | D10523 | W13320 | | 329728 |
| 400 | Sim to Aldehyde dehydrogense (HUM) | | | Mm.24457 | 423605 |
| 401 | Sim to arginyl-tRNA synthetase (Sac Cer) | | | Mm.22363 | 576572 |
| 402 | Sim to ATP synthase epsilon (Bov) | | AA108733 | | 571214 |
| 403 | Sim to ATP synthase F chain | PIR: A54211 | W82194 | | 403660 |
| 404 | Sim to ATP synthase lipid binding (Hum) | X69908 | AA239148 | | 698109 |
| 405 | Sim to b-enolase (human) | X56832 | W11965 | | 316967 |
| 406 | Sim to branched-chain a-ketoacid | TR: G924921 | AA059497 | | 480575 |
| | dehydrogenase kinase | | | | |
| 407 | Sim to carbon catabolite repressor prot. | | AA051133 | | 438774 |
| | (Sac) | | | | |
| 408 | Sim to carbon catabolite repressor prot. | | AA404014 | | 717197 |
| | (Sac) | | | | |
| 409 | Sim to carnitine/acylcarnitine carrier | | AA245413 | | 699181 |
| 410 | Sim to citrate synthase (Por) | | W14146 | | 329884 |
| 411 | Sim to cytochrome b5 (outer mito mem) | | AA203975 | | 640762 |
| 412 | Sim to cytochrome c oxidase VI B (Hum) | X13923 | AA139624 | | 581175 |
| 413 | Sim to cytochrome c oxidase VII | X80899 | AA050684 | | 476180 |
| 414 | Sim to electron trans flavoprotein a sub | J04058 | AA060723 | | 481934 |
| | (Hum) | | | | |
| 415 | Sim to electron trans flavoprotein b sub | X71129 | W18161 | | 333641 |
| | (Hum) | | | | |
| 416 | Sim to enolase a subunit (Hum) | M14328 | AA204262 | | 643854 |
| 417 | Sim to Fructose 1-6-bisphosphate (Hum) | L10320 | AA276043 | | 776124 |
| 418 | Sim to glucose dehydrogenase (Bac. Sub) | | AA241896 | | 680935 |
| 419 | Sim to Glutamate/Malate trans (BOV) | | | Mm.28466 | 582075 |
| 420 | Sim to Glutathione-S-transferase (RAT) | | | Mm.27395 | 317849 |
| 421 | Sim to glycerol 3-phosphate | | W41175 | | 351221 |
| | dehydrogenase 1 (rat) | | | | |
| 422 | Sim to glycogen phosphorylase (Hum) | J03544 | W16286 | | 334236 |
| 423 | Sim to hepatocyte gluc transporter | | AA002666 | | 426758 |
| 424 | Sim to mito RNA pol (HUM) | | AI892781 | Mm.34645 | 608625 |
| 425 | Sim to Mito. 2-oxoglutarate/malate carrier | X66114 | W54000 | | 367801 |
| | (Human) | | | | |
| 426 | Sim to mito. Elongation factor TS (Bov) | | AA245481 | | 699237 |
| 427 | Sim to NADH-ubiquin. oxidoreduct. 13 kd | | AA288040 | | 748891 |
| | sub. | | | | |
| 428 | Sim to NADH-ubiquin. oxidoreduct. 49 kd | | AA109715 | | 572585 |
| | sub. | | | | |
| 429 | Sim to NADH-ubiquin. oxidoreduct. 9 kd | | AA521758 | | 903911 |
| | sub. | | | | |
| 430 | Sim to NADH-ubiquin. oxidoreduct. ashl. | | W83085 | | 404593 |
| 431 | Sim to NADH-ubiquin. oxidoreduct. b14 | | AA462323 | | 871020 |
| | sub. | | | | |
| 432 | Sim to NADH-ubiquin. oxidoreduct. | | W54068 | | 367925 |
| | B14.5 sub. | | | | |
| 433 | Sim to NADH-ubiquin. oxidoreduct. b15 | | AA434897 | | 818906 |
| | sub. | | | | |
| [symbol] | [symbol] idoreduct. b17 | | W54448 | | 367651 |
| [symbol] | [symbol] idoreduct. b22 | | AA415725 | | 846155 |
| [symbol] | [symbol] idoreduct. b9 | | W83574 | | 406509 |
| [symbol] | [symbol] idoreduct. Kfy1 | | W97248 | | 423071 |
| [symbol] | [symbol] idoreduct. mn11 | | AA267638 | | 723360 |
| [symbol] | [symbol] idoreduct. sgdh | | AA222463 | | 671212 |
| [symbol] | [symbol] idoreduct. 15 kd | | AA014507 | | 439668 |
| [symbol] | [symbol] somal prot. S14 | | W89487 | | 419614 |
| [symbol] | [symbol] ctase | | AA241313 | | 653324 |
| [symbol] | [symbol] ctase | | AA259674 | | 735186 |
| [symbol] | [symbol] hyltransferase, | | AA208877 | | 676311 |
| [symbol] | [symbol] se | | | Mm.26793 | 578465 |
| [symbol] | [symbol] enase | M32246 | AA108475 | | 572339 |
| [symbol] | [symbol] | | W11644 | | 318134 |
| [symbol] | [symbol] r mito. mem. | Q01852 | AA498767 | | 888708 |
| [symbol] | [symbol] uctase | | AA087137 | | 493604 |
| [symbol] | [symbol] uctase, core prot. | | AA108590 | | 572127 |
| [symbol] | [symbol] drogenase | | AA067191 | | 523796 |
| [symbol] | [symbol] hate uridyltrans | TR: G881394 | AA473123 | | 805218 |
| [symbol] | [symbol] at synaptic | | AA220458 | | 695279 |
| [symbol] | [symbol] | | In House-Clone | | |
| [symbol] | [symbol] L1)/RPB- | | AA047966 | | 477066 |
| [symbol] | [symbol] | | In House-Clone | | |
| [symbol] | [symbol] | | In House-Clone | | |
| [symbol] | [symbol] | X15684 | AA275871 | | 776543 |
| [symbol] | [symbol] ein | M88463 | AA497767 | | 917403 |
| [symbol] | [symbol] le selenoprotein | S49657, | AI482284 | Mm.554 | 917537 |
| | | M29603 | | | |
| [symbol] | [symbol] tein precursor, | L36062 | AA389406 | Mm.3436 | 569013 |
| [symbol] | [symbol] cursor | M62361 | | Mm.1779 | 580813 |
| [symbol] | [symbol] Cyt B560 | TR: G1019861 | AA137762 | | 580040 |
| [symbol] | [symbol] ) precursor | Z18857, | AA415267 | Mm.2597 | 791140 |
| | | L35525 | | | |
| [symbol] | [symbol] u/Zn Sod) | | AA039044 | Mm5274 | 474545 |
| [symbol] | [symbol] xtracellular | | AI314465 | Mm2407 | 1907770 |
| [symbol] | [symbol] evisiae) | | AI323032.1 | | 477535 |
| [symbol] | [symbol] | | AA220458.1 | | 695279 |
| 469 | Surfeit locus protein 1 | M14689 | AA274488 | Mm.6874 | 748268 |
| 470 | tetrahydrofolylpolyglutamate synthase | U32197 | AA030778 | Mm.3830 | 463571 |
| | precursor | | | | |
| 471 | Thioredoxin | | AA242573 | | 681159 |
| 472 | Thioredoxin | | | Mm.3533 | 579774 |
| 473 | Thioredoxin Reductase | | AI529082 | Mm 25543 | 1887250 |
| 474 | thiosulfate sulfurtransferase | U35741 | AI196763 | Mm.15312 | 1887427 |
| 475 | Thiosulfate sulfurtransferase (mito) Tst1 | U35741 | AI195057 | Mm.15312 | 188763 |
| 476 | TIMP2 | | In House-Clone | | |
| 477 | Tissue inhibitor of metalloproteinase 2 | | AA444490.1 | | 831964 |
| 478 | Tissue inhibitor of metalloproteinase 2 | | AA518165.1 | | 902923 |
| 479 | TOAD | | In House-Clone | | |
| 480 | transforming protein bcl-2-alpha | L31532 | AA867214 | Mm.5155 | 1265430 |
| 481 | transforming protein bcl-2-beta | M16506 | AA867214 | | 1265430 |
| 482 | transforming protein bcl-w (3′ seq) | AF030769.1 | AA563148 | | 975210 |
| 483 | transforming protein bcl-w (5′-seq) | AF030769.1 | AA667328 | | 1139352 |
| 484 | Transketolase (Tkt) | U05809 | AI132421 | Mm.9307 | 1481358 |
| 485 | Type II Peroxiredoxin 1 | | W83228 | Mm42948 | 405943 |
| 486 | Uncoupling Prot homology (UCPH) | | AA260521 | | 748122 |
| 487 | Uncoupling Protein 2 | | | Mm.12556 | 423616 |
| 488 | Uncoupling protein 3 | | AA062091 | | 482847 |
| 489 | Unknown EST | | | | 608265 |
| 490 | uracil-DNA glycosylase | U55040 | W48179 | | 355462 |
| 491 | voltage-dependent anion channel 1 | U230840 | AA244874 | | 680076 |
| 492 | voltage-dependent anion channel 2 | U30838 | AI507203 | Mm.569 | 931442 |
| 493 | voltage-dependent anion channel 3 | U30839 | AA616007 | Mm.38513 | 1066900 |

### Example 3

Identification of Mutations Causing Disease

[0085] The mitochondrial respiratory complex I is assembled from seven mtDNA genes and thirty-six nDNA genes. Patients with complex I defects have phenotypes ranging from midlife-onset optic atrophy to lethal childhood Leigh's disease. Mitochondrial biology expression profiles were determined for patients with a variety of complex I defects. Samples are collected from a variety of patients with complex I defects. Each sample is reverse transcribed, labeled, and hybridized, together with standard target, to a human array comprising probes selected from Example 1. The hybridization measurements are analyzed, leading to the identification of several novel mtDNA mutations and dominant and recessive nDNA mutations.

### Example 4

Profile for Complex IV Leigh's Syndrome

[0086] The mitochondrial biology expression profile was determined for a complex IV Leigh's syndrome (LS) patient. LS is a subacute neurodegenerative condition characterized by necrotic lesions in the brain stem, basal ganglia, thalamus and spinal cord. Death is usually within 2 years of onset of symptoms that may include motor and/or intellectual retardation, abnormal breathing rhythm, nystagmus, opthalmoparesis, optic atrophy, ataxia, and dystonia. The Leigh's syndrome patient had a typical complex IV cytochrome c oxidase deficiency associated with surfeit 1 (SURF-1) gene mutations. This patient was from a consanguineous marriage and was homozygous for a nonsense mutation in the SURF-I gene. Expression profiling of muscle and cultured cell samples from this patient using a human array of Example 1 was performed, in comparison to a control reference standard. NDUFS8 expression was not significantly altered. However, many nuclear and mitochondrially encoded complex I genes were down-regulated, including mtDNA transcripts ND4, NDLA, and ND6. Nuclear genes SURF-1, SOD2, 70 kD heat shock protein, voltage dependent anion channel (VDAC4), adenine nucleotide translocase 2 (ANT2), and glutathione peroxidase 3 were down-regulated.

### Example 5

Profile for Complex I Leigh's Syndrome

[0087] Mitochondrial biology expression profiles were determined for twelve complex I Leigh's syndrome patients (Procaccio, VF (2001) EuroMit5 Abstract). Sequencing of all 43 genes known to be part of complex I, of each patient, identified one patient as a compound heterozygote for two missense mutations in the 23 kD NADH dehydrogenase (NDUFS8) gene of complex I. This patient had a respiratory complex I defect apparent in skeletal muscle and cultured lymphoblastoid cells. Samples were collected from cultured lymphoblastoid cells from this patient and control reference lymphoblastoid cells. Samples were reverse transcribed and differentially labeled and hybridized to a human array comprising probes selected from Example 1. The expression profile was determined using a hierarchical clustering method. Mitochondrial biology expression profiles from the other patients were similarly determined using appropriate samples and controls. Expression profiles of all patients were characteristic of complex I deficiencies, including down-regulation of all mtDNA and some nDNA complex I genes and up-regulation of the adenine nucleotide translocator genes (ANTI and ANT2).

### Example 6

Diagiosis of Complex IV Leigh's Syndrome

[0088] The mitochondrial biology expression profile for Leigh's syndrome SURF-1 nonsense mutations, as determined in Example 4, is used to diagnose patients. Samples are collected from patients and mitochondrial biology expression microarray-tested using a human array containing probes for at least SURF-1, ND4, NDL4, ND6, SOD2, 70 kD heat shock protein, VDAC4, ANT2, and glutathione peroxidase 3.

### Example 7

A Mouse MitoChip

[0089] A mouse Mitochip was printed with probes for 452 genes. Some of these genes were represented by two or more probes, providing internal controls for the reproducibility of gene expression quantitation. An additional 37 control spots were included on the array. Of these, 25 were probes for housekeeping genes to allow normalization between samples. The remaining 12 spots were various controls for hybridization and positioning. Table 2 lists the functional categories and number for all of the housekeeping genes on this array. The cDNA clones that represent each gene were either from the I.M.A.G.E. consortium or cloned by The Center for Molecular Medicine and published in (Murdock et al., 1999). A complete annotation of each gene was compiled and GenBank accession numbers and Unigene cluster numbers were determined. Table 5 provides a list of the probes on this array.

### Example 8

Profile of Sod2 Heterozygote Mutant Mice at Various Ages

[0090] Oxidative stress has been implicated in aging and degenerative disease. Mitochondria are thought to be the main source of reactive oxygen species such as superoxide anion. Mitochondrial superoxide anion is normally detoxified by manganese superoxide dismustase (MnSOD, the Sod2 gene). However, when, free radical metabolism is perturbed, oxidative damage to protein, DNA, and lipids may occur. To demonstrate the effects of increased superoxide anion toxicity on mitochondrial physiology with age, the mitochondrial biology expression profiles of mice with a 50% reduction in MnSOD (Sod2 +/−) were determined at various ages. Samples were collected from young (5 months), middle-aged (10-14 months), and old (20-25 months) wild-type and Sod2 +/− mice. Samples were reverse transcribed and differentially labeled from the corresponding controls. The labeled mutant sample and the corresponding labeled control were hybridized with the mouse array of Example 2. Relative to the control mice, the old Sod2 +/− mice showed induction of antioxidant and apoptosis genes including glutathione peroxidase 3, apoptosis inhibitory factor 3, caspase 1, and the peripheral benzodiazepine receptor.

### Example 9

Profile of Sod2 Homozygote Mutant Mice

[0091] Manganese superoxide dismutase (MnSOD, the Sod2 gene) is a gene expression product involved in mitochondrial biology. Sod2 −/− animals die soon after birth due to the superoxide inactivation of mitochondrial iron-sulfur center enzymes resulting in dilated cardiomyopathy. The mitochondrial biology expression profile of Sod2 −/− mice is determined using the mouse MitoChip of Example 2. RNA samples are collected from Sod2 −/− mice and Sod2 +/+ mice. The Sod2 −/− sample is reverse transcribed and labeled with Cy3 phosphoramidite. The Sod2 +/+ sample is reverse transcribed and labeled with Cy5 phosphoramidite. The labeled samples are incubated with a mouse array under conditions of high stringency hybridization. The hybridization of both samples is measured with a microarray reader. The hybridization measurements are recorded.

### Example 10

Profile of GP×I Mutant Mice

[0092] Glutathione peroxidase 1 (GP×1) is an expressed sequence involved in mitochondrial biology. GP×1 −/− animals show mild growth inhibition and reduced OXPHOS efficiency. The mitochondrial biology expression profile of GP×1 −/− mice is determined using a mouse array of Example 2. RNA samples are collected from GP×1 −/− mice and GP×1 +/+ mice. The GP×1 −/− sample is reverse transcribed and labeled with Cy3 phosphoramidite. The GP×1 +/+ sample is reverse transcribed and labeled with Cy5 phosphoramidite. The labeled samples are incubated with a mouse array under conditions of high stringency hybridization. The hybridization of both samples is measured with a microarray reader. The hybridization measurements are recorded.

### Example 11

Profile of Sod2 Heterozygote GP×1 Homozygote Doubly Mutant Mice

[0093] The mitochondrial biology expression profile of Sod2 −/+ plus GP×1 −/− mice is determined using a mouse array of Example 2. RNA samples are collected from Sod2 +plus GP×1 −/− mice and Sod2 +/+ plus GP×1 +/+ mice. The Sod2 −/+ plus GP×1 −/− sample is reverse transcribed and labeled with Cy3 phosphoramidite. The Sod2 +/+ plus GP×1 +/+ sample is reverse transcribed and labeled with CyS phosphoramidite. The labeled samples are incubated with a mouse array under conditions of high stringency hybridization. The hybridization of both samples is measured with a microarray reader. The hybridization measurements are recorded.

### Example 12

Profile of Mutant Mice Overexpressing Sod2 and/or GP×1

[0094] The mitochondrial biology expression profiles are determined using a mouse array, for mice overexpressing MnSOD and for mice overexpressing MnSOD plus GP×1.

### Example 13

Profile of ρ⁰ Mutant Cell Line

[0095] A mouse array of Example 2 was used to determine the mitochondrial biology expression profile of the mouse mutant cell line ρ⁰, the most extreme case of mitochondrial dysfunction. The LMEB4 (ρ⁰) cell line was profiled against its parental LM(TK)-cell line. The mouse mutant cell line ρ⁰ lacks mitochondrial DNA. To maintain the LMEB4 cell line in culture, it must be grown in media supplemented with glucose, pyruvate, and uridine (GUP media). A scatter plot of the gene expression ratios is shown in FIG. 3. Samples from the ρ⁰ cell line and from the LM(TK) cell line were reverse transcribed and differentially labeled using a standard two-color fluorescent system, and hybridized to a mouse array of Example 2. Mouse array analysis confirmed that all mtDNA-encoded transcripts were absent from the LMEB4 cells, and that there was a reduction in NDNA OXPHOS gene expression, aconitase, and nuclear receptor binding factor 1 (NRBF1). There was an increase in expression of key glycolytic genes, mitochondrial ribosomal proteins, the LON protease, heat shock protein 84 (HSP 84), Bcl-X binding protein, and antioxidant protein 1. Invariably, the nuclear-encoded OXPHOS complex subunits were also down-regulated between 3 and 38-fold with a mean of 4.5 (the mean was calculated excluding the single outlying complex I subunit NADH-dehydrogenase mwfe which was down-regulated 38-fold). Mitochondrial transport proteins such as the Glutamate-malate transporter were down-regulated as was the mitochondrial protein import subunit gene Tim17 and several amino acid metabolism genes. By contrast, glycolytic genes such as pyruvate kinase, glucose phosphate isomerase and glucose-6-phosphate dehydrogenase were up-regulated 2 to 3-fold. Phosphofructokinase was up 1.6-fold. Anti-apoptotic genes such as apoptosis inhibitor 2 and 3 were up-regulated as was the pro-apoptotic Bcl-Xs binding protein BNIP3 and Caspase 2. The other Bcl protein family members that are on the array were not changed significantly. The multi-function mitochondrial LON protease was up-regulated 2. 1-fold.

### Example 14

Profile of CAP^{R} Mutant Cell Line

[0096] A mouse array of Example 2 was used to determine the mitochondrial biology expression profile of the mouse mutant cell line harboring a mutation for chloramphenicol resistance (CAP^{R}), and the CAP^{R} 501-1 cell line having a mtDNA mutation in the 16S rRNA gene. The CAP^{R} mutation in chimeric mice causes cataracts, reduced photoreceptor response, vacuolization of the retinal pigment epithelium, and hamartomatous outgrowths of the optic nerve head. Mice inheriting the CAP^{R} mutation showed a marked increase in embryonic lethality, and those that were born died within two weeks with growth retardation, dilated cardiomyopathy, and mitochondrial abnormalities. CAP^{R} 501-1 was compared to the CAPS LM(TK)-cell line. These two cell lines are both derived from mouse L929 cells. Samples from the CAP^{R} cell line and from wild-type cells were reverse transcribed and differentially labeled with a standard two-color fluorescent system, and hybridized to a mouse array of Example 2. The CAP^{R} cell line had up-regulation of all thirteen mtDNA transcripts, but down-regulation of multiple nDNA OXPHOS genes. The CAP^{R} 501-1 cell line versus the LM(TK)-gene expression scatter plot showed that all mtDNA transcripts were up-regulated 3.1 to 3.5-fold while the nuclear encoded OXPHOS subunits were down-regulated 2.1 to 5.3-fold. Procollagen type III and VI were also up-regulated 3.5 to 4-fold.

### Example 15

Profile of Treatment to Cell Line

[0097] Mouse arrays of this invention were used to demonstrate how treatment changes, such as changing cell culture conditions, affect gene expression. The control cell line LM(TK)-grown in standard medium was profiled against a culture of LM(TK)-cells grown in media supplemented with glucose, pyruvate, and uridine (LM(TK)-(GUP)). Samples from the treated fibroblast cell line and from untreated fibroblast cells were reverse transcribed and differentially labeled with a standard two-color fluorescent system, and hybridized to a mouse array of Example 2. Treatment resulted in a down-regulation of the LON protease and HSP 84. The scatter plot of this experiment showed that other than the same core group of genes that were up-regulated in the NZB cell line mentioned in Example 17, few genes were significantly different in their expression. The hybridization spots of three genes that showed the highest differences were HSP70, the LON protease, and E.T.F. The 70 kDa heat shock protein (HSP70) was down-regulated 3.4-fold. HSP70 has been shown to be a chaperone protein involved in mitochondrial protein import that forms an ATP-dependent motor with the inner mitochondrial membrane translocase and the polypeptide in transit (Voos, W. et al., “Mechanisms of protein translocation into mitochondria,” [ 1999] Biochimica et Biophysica Acta 1422:235-54). The entire HSP70 control spot was of medium intensity, while the experimental spot was only medium intensity in the center. The LON protease was down-regulated 9.7 fold in LM(TK)-cells grown in GUP. The control LON protease spot was of medium high intensity over the entire spot and of low intensity in the experimental spot. The electron transfer flavoprotein (ETF), which shuttles electrons gathered during fatty acid metabolism to the electron transport chain, was down-regulated 3.8 fold. The E.T.F control spot was high intensity and the experimental spot very low intensity. Some of the nuclear encoded OXPHOS subunits as well as several proteins involved in amino acid metabolism were down-regulated 1.5 to 2-fold with mean ratio of 1.65. Since most of these genes fell below the +/−1.7 ratio cutoff, further analysis was needed to determine if the expression pattern was significant. There were no differences in mtDNA transcript levels and no consistent pattern of up-regulation of glycolytic genes.

### Example 16

Profile of Sod2 Mutant Mice After Treatment and Before Symptoms

[0098] Treatment of Sod2 mutant mice with MnTBAP prevents cardiac and liver pathology, however after 12 days the MnTBAP-treated mutant animals develop a prominent movement disorder which leads to debilitation by three weeks, in association with spongiform changes and gliosis in the cortex and specific brain stem nuclei associated with motor function. It is thought that the severe neuropathology results from poor exchange of MnTBAP across the blood brain barrier. The mitochondrial biology expression profile of MnTBAP-untreated, Sod2 mutant mice and MnTBAP-treated, Sod2 mutant mice was determined using the mouse array of Example 2. Samples were collected from 8 day old Sod2 mice without MnTBAP treatment, 8 day old Sod2 mice with MnTBAP treatment, and 12 day old Sod2 mice with MnTBAP treatment. Samples were also collected from age-matched controls. About 20 genes were found to be differentially expressed in all three groups of Sod2 knockout mice compared to the corresponding age-matched controls. The about 20 genes included bioenergetic genes such as the mitochondrial creating phosphokinase, antioxidant enzymes like the glutathione peroxidase 3, and apoptotic factors including caspase I and apoptosis inhibitor factor 3. The excitatory amino acid transporter 3, fiataxin, and one EST of unknown function were also induced. Mitochondrial biology expression profiling demonstrated changes in expression before neuropathic changes were manifested.

### Example 17

Organ-Specific Profiles of Mutant Mice

[0099] The NZB mouse line mtDNA and the “common haplotype” mtDNAs (129/Sv, C57B1/6J, C3H, BALB/c, and others which are thought to have arisen as the progeny of a single female (Ferris et al.,1982) differ by 108 nucleotides, and these polymorphic differences have been used to monitor the segregation of heteroplasmic populations of mtDNAs in mice created by embryo fusion techniques (Jenuth, J. P. et al., “Random genetic drift in the female germline explains the rapid segregation of mammalian mitochondrial DNA,” [1996] Nat Genet 14:146-51; Jenuth, J. P. et al., “Tissue-specific selection for different mtDNA genotypes in heteroplasmic mice,” (1997) Nat Genet 16:93-5; Meirelles, F. V., and Smith, L. C., “Mitochondrial genotype segregation in a mouse heteroplasmic lineage produced by embryonic karyoplast transplantation,” (1997) Genetics 145:445-51; Meirelles, F. V. and Smith, L. C., “Mitochondrial genotype segregation during preimplantation development in mouse heteroplasmic embryos,” [1998] Genetics 148:877-83). Tissues from the NZB and CAP^{R} mice were profiled on a mouse array. Messenger RNA was isolated from the brain, liver, spleen, kidney, heart, and skeletal muscle of a male mouse heteroplasmic for the NZB mtDNA and a male mouse that was 80% chimeric for ES cell-derived CAP^{R} cells as defined by coat color. Due to the severity of the CAP^{R} mutation it was not possible to analyze the mitochondrial gene expression changes in mice that were homoplasmic for the CAP^{R} mtDNA. Control mRNA for each of the tissue samples was isolated from sex, age, and nuclear background-matched control mice. All of the tissue samples were genotyped to determine the levels of heteroplasmy for the NZB and CAP^{R} mtDNA in each of the tissues. Equal levels of the NZB and “common” mtDNA were found in the six tissues analyzed from the NZB mtDNA-positive mice. The six tissues from the CAP^{R} chimera had varying levels of CAP^{R} mtDNA with the kidney and spleen having the highest amounts, 65% and 50% CAP^{R} mtDNA, respectively. The heart contained approximately 20% CAP^{R} mtDNA, while brain, liver, and muscle all contained between 5% and 10% CAP^{R} mtDNA. Analysis of the NZB-mtDNA tissue samples did not reveal any differentially expressed genes in the heart, liver, brain, and kidney. A scatter plot from the NZB heart is shown in FIG. 4. The scatter plots from the liver, brain, and kidney are virtually identical in that nearly every gene has an expression ratio of 1. Analysis of the NZB-mtDNA spleen and muscle showed several genes that were differentially expressed in the two tissues. The NZB-mtDNA muscle showed a 1.5 to 2.1-fold reduction in all mtDNA transcripts, pyruvate dehydrogenase was down 2.2-fold, and there was a general trend for nuclear-encoded OXPHOS subunits to be down-regulated 1.4 to 1.8-fold. The vesicular transport protein, pantophysin, was down-regulated 4-fold and the glycogenolysis rate-limiting enzyme, glycogen phosphorylase, was down 3-fold. There were not any genes that were significantly up-regulated in the muscle. A similar pattern of mtDNA-encoded gene expression was observed in the NZB-mtDNA spleen with all transcripts down 1.8 to 2-fold. However, there were no differences in nuclear OXPHOS subunit expression levels like that observed in the NZB-mtDNA skeletal muscle. In contrast to the NZB-mtDNA muscle, several genes were up-regulated in the spleen. In direct opposition to the results in the NZB cell line, both probes of the heme biosynthesis gene coproporphyrinogen oxidase III derected up-regulation 3-fold in the spleen. The integral membrane protein SURF 4 was up 2-fold and the amino acid metabolism gene 2-amino-3-ketobutyrate CoA ligase was up 4.8-fold. Glycogen phosphorylase, down 3-fold in the muscle, was up 4.8 fold in the spleen. The muscle and spleen results suggest that the polymorphisms between the NZB and “common” mtDNA may have a functional consequence in some tissues but not others. Analysis of the CAP^{R} tissue samples did not show any genes to be differentially expressed in the kidney, heart, muscle, liver, or spleen. The kidney, having the highest percentage of mutant mtDNAs, had expression ratios around 1 for nearly every gene. The two outliers on the kidney scatter plot that appear to be down-regulated can be explained by hybridization artifacts causing a high background in the control sample. The CAP^{R} brain sample was the only tissue that had any differentially expressed genes. Skd 3 was up-regulated 2.2-fold, glutathione peroxidase was up 2.4-fold and apoptosis-inhibitor 3 was up 2.4-fold. Although no genes were down-regulated in the brain more than 1.8-fold, closer analysis of the brain samples did reveal a trend that was not observed in any of the other tissues. Several nuclear-encoded OXPHOS subunits were down-regulated between 1.3 and 1.6-fold. These included five Complex I subunits, three Complex IV subunits and five Complex V subunits as well as VDAC 1 and 3. None of the Complex II and III subunits or mtDNA transcripts followed this trend. Principal component analysis of NZB and CAP^{R} mouse tissues, separately and together with the cell lines, was performed.

### Example 18

Identification of Genes for Mitochondrial Arrays

[0100] Mice mutant in mitochondrial biology were used to identify genes involved in mitochondrial biology. Mice deficient in the heart/muscle isoform of the adenine nucleotide translocator (ANTI) exhibit many hallmarks of human oxidative phosphorylation (OXPHOS) disease, including dramatic proliferation of skeletal mitochondria. Samples were collected from the gastrocnemius muscle of ANTI and wild-type mice, reverse transcribed and differentially labeled, and hybridized with a mouse microarray chip (Mouse Unigene 1, Incyte Genomics Inc., Palo Alto, California) containing over 8000 sequence-verified cDNAs. Analysis of the hybridization results identified more than 150 differentially expressed genes. Gene sequences that were not previously recognized as being involved in mitochondrial biology were used to generate probes that were placed on the mouse array of Example 2. Homologous human gene sequences were used to generate probes that were placed on the human array of Example 1.

### Example 19

Profile of Age-Related Changes in Chimpanzee Using Human Mitochondrial Array

[0101] Age-related changes in the mitochondrial biology expression profile in chimpanzees are determined using a human array of Example 1. Samples from young adult chimpanzee muscle and samples from most-mortem tissues of older chimps are reverse-transcribed, differentially labeled, and hybridized with a human array of Example 1.

### Example 20

Profile of Putative Neutral Variant Mutant Mouse

[0102] The NZB cell line was profiled to examine the changes in mitochondrial gene expression resulting from a more neutral set of mtDNA polymorphisms. As mentioned previously, the NZB mtDNA contains 108 sequence differences compared to the “common” mouse mtDNA genotype found in LM(TK). While these differences were reported to be neutrally polymorphic (Jenuth et al., [1996] Nature Genetics 14:146-151; Meirelles and Smith [1997] Genetics 145:445451), the only evidence to support that hypothesis is that transgenic mice containing a high percentage of NZB mitochondria have no overt phenotypes (Levy, S. E., “Genetic Alteration of the Mouse Mitochondrial Genome and Effects on Gene Expression,” (2000) Ph.D. Thesis, Emory University; Jenuth et al. [1997] Nature Genetics 16:93-95; Meirelles and Smith [1998] Genetics 148:877-883). An NZB cybrid cell line was profiled on a mouse mitochondrial array. The scatter plot of gene expression ratios between the NZB cell line and the parental LM(TK)-(without GUP supplementation) shows that both probes of the fatty acid metabolism gene Acyl-CoA dehydrogenase (medium-chain) detected up-regulation 3.6-fold. Procollagen III and VI were up-regulated 6.2 and 6.8-fold, respectively. Two independent probes of the coproporphyrinogen oxidase III gene that is involved in heme biosynthesis detected down regulation 2.6 and 2.3-fold. Also down-regulated was the peripheral-type benzodiazepine receptor. This receptor has been implicated in a variety of mitochondrial functions including the regulation of mitochondrial protein import under conditions of oxidative stress, calcium homeostasis, and steroidogenesis (Culty, M. et al., “In vitro studies on the role of the peripheral-type benzodiazepine receptor in steroidogenesis,” [1999] J. Steroid Biochemistry & Molecular Biology 69:123-30; Wright, G., and Reichenbecher, V. “The effects of superoxide and the peripheral benzodiazepine receptor ligands on the mitochondrial processing of manganese-dependent superoxide dismutase,” [1999] Experimental Cell Research 246:443-50). The glycolytic genes glyceraldehyde-3-phosphate dehydrogenase and glucose-6-phosphate isomerase were up-regulated 1.7 and 2.1-fold, respectively. Glycolytic genes were also up-regulated in the NZB cell line. This indicates that the sequence polymorphisms between the NZB and “common” mtDNAs are not entirely neutral and cause changes in mitochondrial function when combined with the LM(TK)-nucleus. Thus, the NZB mtDNA does not appear to be completely interchangeable with the “common” mtDNA genome. An interesting group of genes that were up-regulated in the NZB cell line were the pro-inflammatory genes Caspase 1 and platelet activating factor (PAF) acetylhydrolase, the mitochondrial RNA polymerase, and glutathione peroxidase 3.

### Example 21

Hierarchical Clustering of Cell Lines

[0103] Principal component analysis (PCA) and hierarchical clustering were performed on the cell line data (Examples 13-15 and 20) to group genes based on similarities in their expression patterns over all the samples. PCA analysis was used to reduce the dimensionality of the data by calculating three principal axes that encompass as much of the variability in all of the samples as possible. Each of the samples was then plotted on those axes in three-dimensional space. The PCA results revealed that the NZB cell line clustered away from the other cell lines, consistent with it having fewer differentially expressed genes in common with the other samples. The LMEB4 ρ0, 501-1 and LM(TK)-(GUP) cell lines all arrayed along one common principle axis, probably due to the commonality of a down-regulation of nuclear OXPHOS genes. However, they were divergent in the other two axes. The LM(TK)-(GUP) and NZB did share one axis, possibly due to a partial reduction in OXPHOS genes and a concomitant induction of glycolytic gene expression. However, both showed few differences when compared to the CAP R 501-1 and LMEB4 ρ0 samples. A hierarchical clustering algorithm was used to group genes with similar expression profiles across all of the samples. Both genes as well as samples were clustered together using a Euclidean distance measurement and average linkage. The clustering results revealed seven groups of genes with similar expression patterns in the cell line samples. Certain classes of genes were found to change together. Similar to the PCA analysis, the expression changes seen in the LM(TK)-(GUP) and NZB samples clustered closest together with the CAP R 501-1 and LMEB4 ρ0 samples branching successively further away. The Group 1 genes are involved in fatty acid metabolism. Group 2 genes, mainly down-regulated in the LM(TK)-(GUP) sample, include malate dehydrogenase, lactate dehydrogenase, glucose phosphate isomerase, and several amino acid metabolism genes. Group 3 genes are diverse clusters of genes that change in expression coordinately across the 5 samples. It includes some nuclear-encoded OXPHOS subunits, a few antioxidant and transport proteins as well as pyruvate kinase and a GTP-binding protein. Group 4 is a small, diverse cluster of genes mainly up-regulated in the CAP R 501-1 cell line. This group includes several of the same genes found to be up-regulated in the Ant1(−/−) mouse by differential display analysis (Murdock et al., 1999). Also in this group are two NADP-transhydrogenases, carbonate dehydratase and cytochrome b5 reductase. Group 5 is almost exclusively nuclear-encoded OXPHOS subunits. The voltage-dependent anion channel (VDAC) genes and several antioxidant proteins also cluster in this group. Group 6 is composed almost entirely of mtDNA-encoded transcripts. Group 7 is the heterogeneous group of genes that were up-regulated in each of the samples analyzed and included Caspase 1, PAF acetylhydrolase, the mitochondrial RNA polymerase, and glutathione peroxidase 3. Hierarchical clustering packages are available in the art, i.e. Expression Profiler (http://ep.ebi.ac.uk/EP/ from the European Bioinformatics Institute, Cambridge, UK). PCA is described in Bioinformatics 2001, volume 17, number 9, pages 763-774.

[0104] The following examples describe the preparation of a mitochondrial biology expression array, sample preparation, hybridization, scanning, and data normalization.

### Example 22

PCR Amplification

[0105] PCR amplifications were performed with standard PCR techniques. Probes were made my amplifying clones using a universal primer set (Forward primer 5′-CTGCAAGGCG ATTAAGTTGGGTAAC-3′ Reverse primer 5′-GTGAGCGGATAACAATAATCAC ACAGGAAACAGC-3′) in a 100 μl PCR reaction containing PCR buffer (10 mM Tris, 1.5 mM MgC12, 50 mM KCl, pH8.3), 0.2 mM dNTPs, 0.2 mM each primer, 1.25 U Taq (Sigma, St Louis, Mo.). 0.5-1 μl of bacterial culture was added to each PCR reaction and thermal cycling was done as follows: 4 minutes at 94 C followed by 35 cycles of 15 seconds at 94 C, 30 seconds at 66 C and 1 minute 30 seconds at 72 C. Following cycling, reactions were held at 72 C for 4 minutes to complete all extension reactions. All PCR products were confirmed by agarose gel electrophoresis through a 1.5% gel. After satisfactory amplification, products were quantitated by UV 260/280 ratio and desiccated in a Savant Speed-Vac (Holbrook, N.Y.). Dried products were then resuspended in 3×SSC (450 mM NaCl, 40 mM sodium citrate) at a concentration of 400-600 ng/μl for arraying.

### Example 23

Slide Preparation

[0106] Before arraying probes, the glass microscope slides for the arrays were coated with poly-Lysine to provide a substrate for DNA binding. Standard glass microscope slides (Gold Seal, Beckton-Dickson, Franklin Lakes, N.J.) were cleaned in a solution of 2.5 M NaOH, 60% ethanol for two hours. After cleaning, slides were rinsed five times in fresh water. The slides were then soaked in a solution of 0.01 % poly-L-lysine, .01× PBS for 1 hour followed by rinsing in fresh water. After rinsing, the slides were dried in a vacuum oven at 45° C. for 15 minutes.

### Example 24

Printing

[0107] Arrays were printed onto poly-L-lysine coated glass slides using the GMS 417 Arrayer (Affymetrix/Genetic Microsystems, Woburn, Mass.). The arrays were printed using a 4-pin print head with a spot size of 150 μm (approximately 33 μpL of volume per spot) and a center-to-center spot spacing of 375 μm. A humidity level of 65-70% was maintained during the printing of the arrays by a custom humidifier system. After printing, the arrays were allowed to dry for 1 hour at room temperature. The arrays were then processed by rehydrating over a warm solution of 1×SSC for 5 minutes followed by rapid drying on a 95° C. heat block. Following drying, the DNA was crosslinked to the slide by exposing the arrays to 65 mJ of ultraviolet energy (Stratalinker, Stratagene, La Jolla, Calif.). To block non-specific interactions on the arrays during hybridization, the slides were then treated with a solution of 60 mM succinic anhydride and 40 mM sodium borate in 1-methyl-2-pyrrolidinone for 15 minutes at room temperature. The arrays were then denatured in 95° C. water for 2 minutes and dehydrated by rapid immersion in 95% ethanol. The arrays were then dried by centrifugation at 20 ×g for 5 minutes.

### Example 25

Sample Preparation

[0108] Total RNA preparations were performed using the TRizol reagent (Life Technologies, Gaithersburg, Md.) as per the manufacture's directions. For cell culture samples, a 90% confluent 225ml flask was lysed directly in the flask with 18 ml of TRIzol. At least three flasks were pooled for each cell line to reduce any variability caused by culture conditions. For each mouse tissue, RNA was isolated from approximately 500 mg of tissue that was mechanically homogenized. in 6ml of TRizol. Following the isolation of total RNA, poly-A+ MRNA was isolated using Qiagen Oligotex (Valencia, Calif.) as per the manufacture's directions.

### Example 26

Reverse Translation Labeling, and Hybridization

[0109] To produce targets for hybridization to the MitoChip arrays, 2 μg of poly-A+ RNA was labeled with fluorescent nucleotides by reverse transcription. The poly-A+ RNA was mixed with 3 mg of anchored oligo-dT and incubated at 70° C. for 10 minutes followed by 10 minutes on ice. The denatured and annealed RNA was then reverse transcribed in a 30 μl reaction mix containing reaction buffer (50 mM Tris-HCl, 75 mM KCl, 3 mM MgC12 pH 8.3), 10 mM dithio-threatol, 500 μM dATP,dGTP,dTTP, 300 μM dCTP, 20 U SuperScript reverse transcriptase (Life Technologies, Gaithersburg, Md.) and 100 μM of either Cy5-dCTP (control samples) or Cy3-dCTP (experimental samples). The reactions were incubated at 42° C. for 2 hours. Following incubation, 15 μl of 0.1 M NaOH was added to degrade the remaining template RNA and the sample incubated at 70° C. for 10 minutes. The reaction was neutralized by the addition of 15 μl of 0.1 M HCl followed by 440 μl of TE buffer (10 mM Tris, 1 mM EDTA, pH 7.4). The synthesized cDNA was purified by size-exclusion filtration using Microcon YM-3 centrifugal filter devices (Millipore, Bedford, Mass.). After purification, 10 μg of poly-A RNA (Sigma, St Louis, Mo.) and 10 μg of yeast transfer RNA (tRNA) (Life Technologies, Gaithersburg, Md.) was added. The final sample volume was adjusted to 12 μl and 525 mM NaCl, 52.5 mM sodium citrate, 0.25% SDS. The sample was denatured at 100° C. for 2 minutes and added to the array. The sample and the array were hybridized under high stringency hybridization conditions. The sample and array were covered by a 22 mm×22 mm coverslip and placed in a humidified hybridization chamber (Corning, Acton, Mass.) and incubated at 65° C. for 12-16 hours. Following hybridization, the arrays were washed with successive 5-minute washes in 2×SSC, 0.1%SDS; 1×SSC; and 0.1×SSC. After the final wash, the arrays were dried by centrifugation at 20×g and scanned using the GMS 418 Array Scanner (Affymetrix/Genetic Microsystems, Woburn, Mass.).

### Example 27

Array Scanning and Data Analyses

[0110] Scanned arrays were saved as 16-bit TIFF files and analyzed using Biodiscovery's Imagene software (Los Angeles, Calif.). Data mining and clustering analysis was performed using Biodiscovery's GeneSight software. Prior to data analysis, all cell culture samples were normalized using all spots on the array. All mouse tissue samples were normalized to the housekeeping genes on the mouse array. Local background was calculated for each individual spot and any spot with a signal intensity less than 3 times over background or that had poor morphology was excluded from the data analyses. Only differential expression values of greater than 1.7 were considered significant. All data mining and clustering analysis performed using GeneSight was on expression ratio data that was transformed by taking the natural log (ln) of all values and normalized by Z-score. The data is transformed because of the non-Gaussian distribution of the expression ratio values. Because the ratios are bounded on the lower limit by zero, a non-Gaussian distribution is normally observed. To allow for additional statistical manipulations, the data was transformed for a more uniform distribution. The Z-score normalization method involved subtracting the mean from every observation and dividing by its standard deviation, effectively normalizing each spot to all other spots on the array.

### Example 28

Sample Hybridization to Mitochondrial Array

[0111] Control cDNA samples were prepared from mRNA isolated from the LM(TK)-cell line and labeled with the CyS dye. Each experimental MRNA sample was labeled with the Cy3 dye, combined with the Cy5 control sample and the mixture used to hybridize the array. A representative image of a hybridized array is shown in FIG. 2. Any spot on an array that appeared red was due to hybridization of a large proportion of the CyS-labeled control LM(TK)-sample and any sample that was green was due to the hybridization of a large proportion of the Cy3-labeled experimental sample. Any spot that is yellow is an about equal co-hybridization of the two targets. The fluorescence ratio was quantitated for each spot, permitting calculation of the relative abundance of each gene's MRNA in the two samples.

### Example 29

Normalization

[0112] The two fluorescent dyes that were used to label the cDNA produced during the reverse transcription of the MRNA have different structures and different emission maxima. Therefore, the two images that represent the hybridization of each of the fluorescently labeled samples were normalized to each other to account for the differences in dye behavior prior to calculating the expression ratios between the two images. One image was normalized to the other by averaging all of the spots in each image to derive a constant that was then applied to each spot. Alternatively, a predetermined set of genes that were expressed equally in the two samples under all conditions could have been used. The expression ratios of these genes were used to calculate a constant that was then applied to all spots on the array. A set of 25 housekeeping genes in Table 2 was included on a mouse array for normalization and both of these methods were used in the analysis of the mouse cell line and tissue samples. Housekeeping gene expression in the cultured cells was much more variable than in the tissue samples. Because of the variability in the housekeeping gene expression patterns in the cell line samples, normalization was done using all of the spots on the array. The expression of the housekeeping genes was much more consistent in the tissue samples and normalization using either the housekeeping genes or the average of all of the genes gave similar results.

### Example 30

Clones useful for making control probes for the arrays of this invention are listed in

[0113] Table 6. Sequences of the genes useful for making the control probes are provided in the sequence listings hereof.

TABLE 6

| SEQ | | | GenBank |
|---|---|---|---|
| ID NO. | Gene Name | Complete Gene Name | Accession No. |
| 3041 | Beta Actin | Human beta actin | X63432 |
| 3042 | Plant control CAB | Arabidopsis photosystem | X56062 |
| | | I chlorophyll a/b | |
| | | binding protein | |
| 3043 | Plant control rbcL | Arabidopsis ribulose-1,5- | U91966 |
| | | bisphosphate | |
| | | carboxylase/oxygenase | |
| | | large subunit | |
| 3044 | Plant control | Arabidopsis RUBISCO | X14212 |
| | RUBISCO | activase | |

[0114] It will be appreciated by those of ordinary skill in the art that samples, sample collection techniques, sample preparation techniques, probes, probe generation techniques, genes involved in mitochondrial biology, hybridization techniques, array printing techniques, physiological conditions, cell lines, mutant strains, organisms, tissues, solid substrates, and methods of data analyses other than those specifically disclosed herein are available in the art and can be employed in the practice of this invention. All art-known functional equivalents are intended to be encompassed within the scope of this invention.

### REFERENCE TO SEQUENCE LISTINGS

[0115] Tables 3-5 list sequence information on the clones that are useful for making probes for practicing the methods of this invention. Clone identification numbers are usually from NIA (National Institutes of Aging, National Institutes of Health, Bethesda, Md., USA), ResGen Invitrogen (Carlsband, Calif., USA) or IMAGE Consortium, LLNL (Livermore, Calif., USA). Gene names and descriptions are provided for the gene interrogated by a probe made from the corresponding clone. GenBank Accession Number and Unigene Cluster ID are provided where available. The functions of certain genes are included in Table 4. Sequences of the 5′ and 3′ ends of the clones listed in Tables 34 are provided when available. If no 5′ or 3′ sequence was available, gene sequence from the GenBank Accession No. provided for that clone is listed in some cases. The GenBank sequence may be larger than the sequence of the clone. The instant invention may be practiced without the sequence information provided herein using the clones or GenBank listings. Other sequences derived from the genes interrogated by probes generated from clones listed in Tables 3-5 are useful for making equivalent probes using information known in the art, i.e., unique segments of such genes may be used.

[0116] The sequence listings that correspond to the clones listed in Table 3, covering human probes SEQ ID NOS: 1-994, contain information including: the sequence identification number; a GenBank Accession No. corresponding to the listed sequence or the gene interrogated by the probe containing the listed sequence; another GenBank Accession No. in parentheses which is associated with the listed sequence in Table 3; a Research Genetics (ResGen Invitrogen, Carlsbad, Calif., USA) Clone ID No. identifying the clone from which the sequence was derived; the name of the gene from which the clone was derived; a description of the gene; the Unigene Cluster ID No. of the gene; the IMAGE Clone ID No., which is often the same as the ResGen Clone ID No., and information in parentheses identifying the sequence as 5′ or 3′ of the clone; the length of the insert of the clone; the source of the clone; the type of clone, such as cDNA; and the nucleic acid sequence.

[0117] Sequence listings for control probes are provided as SEQ ID NOS:3041-3044.

[0118] The sequence listings that correspond to the clones listed in Table 4, covering mouse probes SEQ ID NOS:995-3040, contain information including: the sequence identification number; a GenBank Accession No. corresponding to the listed sequence; the 5′ and/or 3′ sequence of the corresponding clone, or the gene from which the corresponding clone was derived; the name and description of the gene from which the corresponding clone was derived; the Unigene Cluster ID No. of the gene from which the corresponding clone was derived; the name of the clone from which the instant sequence was derived; additional description of the gene; a set of titles usually including Clone Name, Rearray Sequence, Parent Sequence, Other EST, and Blast Link; a list of names including, in order of the above-mentioned titles, the name of the clone from which the sequence was derived, the name of the sequence with a suffix identifying it as the 5′ (−5) or 3′ (−3) sequence of the clone, the name of the parent sequence, and the name of another EST (expressed sequence tag), if it exists, which would be the other of the 3′ or 5′ sequence; the length of the sequence provided; and the nucleic acid sequence.

We claim:

1. An array comprising at least two isolated nucleotide molecules, each molecule having a sequence capable of uniquely hybridizing to a nucleic acid molecule which is an expression product of a gene involved in mitochondrial biology.

2. An array comprising two or more isolated nucleic acid molecules or spots, each spot comprising a plurality of isolated nucleic acid molecules, each molecule having a sequence consisting essentially of a sequence selected from the group consisting of the sequences of human probe set #1, SEQ ID NOS: 1 to 994, or mouse probe set #2, SEQ ID NOS: 995 to 3040, and sequences having at least 70% homology to the foregoing sequences.

3. The array of claim 2 printed on a glass slide.

4. The array of claim 2 comprising more than about ten spots.

5. The array of claim 2 comprising more than about twenty-five spots.

6. The array of claim 2 comprising all of the isolated nucleic acid molecules having the sequences of human probe set #1, SEQ ID NOS: 1 to 994.

7. The array of claim 2 comprising all of the isolated nucleic acid molecules having the sequences of mouse probe set #2, SEQ ID NOS: 995 to 3040.

8. The array of claim 2 also comprising one or more spots comprising control nucleic acid molecules, SEQ ID NOS:3041-3044.

9. A method for determining an expression profile of a sample containing nucleic acid comprising:
a) providing the sample;
b) providing an array of claim 2;
c) contacting said array with said sample under conditions allowing selective hybridization; and
d) measuring hybridization of nucleic acid in said sample to said array to produce an expression profile.

10. The method of claim 9 wherein said sample is from a mouse or a human.

11. A method for determining an expression profile of a first labeled sample containing nucleic acid relative to a second, differently labled sample containing nucleic acid comprising:
a) providing the first labeled sample;
b) providing the second, differently labeled sample;
c) providing an array of claim 2;
d) contacting the array with the first sample and the second sample under conditions allowing selective hybridization;
e) measuring hybridization of said first and said second samples to said array; and
f) comparing the hybridization of said first sample to the hybridization of said second sample to produce an expression profile.

12. The method of claim 11 wherein said second sample is a reference or a standard.

13. A method for determining an expression profile diagnostic of an energy-metabolism-related physiological condition comprising:
a) providing a labeled first sample from a first group of one or more individuals with said physiological condition;
b) providing a differently labeled second sample from a second group of one or more individuals without said physiological condition;
c) providing an array of claim 2;
d) contacting the array with the first sample and the said second sample under conditions allowing selective hybridization;
e) measuring hybridization of said first and said second samples to said array; and
f) comparing the hybridization of said first sample to the hybridization of said second sample to produce an expression profile diagnostic of said physiological condition.

14. A method of making an array comprising:
a) providing a prepared substrate; and
b) printing two or more spots in known positions on said substrate, each spot comprising a plurality of isolated nucleic acid molecules, each molecule having a sequence consisting essentially of a sequence selected from the group consisting of human probe set #1, SEQ ID NOS: 1 to 994, mouse probe set #2, SEQ ID NOS: 995 to 3040, and sequences having at least 70% homology to the foregoing sequences.

15. The method of claim 14 wherein said array comprises all of said isolated nucleic acid molecules in human probe set #1, SEQ ID NOS: 1 to 994.

16. The method of claim 14 wherein said array comprises all of said isolated nucleic acid molecules in mouse probe set #2, SEQ ID NOS: 995 to 3040.

17. A method of diagnosing a first individual with Complex IV Leigh's Syndrome comprising detecting in a first sample from said first individual at least about a 1.7-fold decrease in the amount of expression of genes comprising ND4, NDL4, ND6, SURF-1, SOD2, 70 kD heat shock protein, VDAC4, ANT2, and glutathione peroxidase 3 compared to the amount of expression of said genes in a second sample from a second individual without Complex IV Leigh's Syndrome.

18. A library of at least two isolated nucleic acid molecules, each molecule having a sequence consisting essentially of a sequence selected from the group consisting of human probe set #1, SEQ ID NOS: 1 to 994, mouse probe set #2, SEQ ID NOS: 995 to 3040, and sequences having at least 70% homology to the foregoing sequences.

19. An array comprising at least two spots, each spot comprising a plurality of isolated nucleic acid molecules, each molecule comprising a sequence with at least 70% homology to a sequence selected from the group consisting of human probe set #1, SEQ ID NOS: 1 to 994.

20. An array comprising at least two spots, each spot comprising a plurality of isolated nucleic acid molecules, each molecule comprising a sequence with at least 70% homology to a sequence selected from the group consisting of mouse probe set #2, SEQ ID NOS: 995 to 3040.

The application's sequence listing, which the Patent Office published only in electronic form, follows.

SEQUENCE LISTING (3040 sequences)

SEQ ID NO: 1 - DNA, 954 bp, Homo sapiens
aataggtttggtcctagcctttctattagctcttagtaagattacacatgcaagcatccccgttccagtgagttcaccctctaaatcaccacgatcaaaagggacaagcatcaagcacgcagcaatgcagctcaaaacgcttagcctagccacacccccacgggaaacagcagtgattaacctttagcaataaacgaaagtttaactaagctatactaaccccagggttggtcaatttcgtgccagccaccgcggtcacacgattaacccaagtcaatagaagccggcgtaaagagtgttttagatcaccccctccccaataaagctaaaactcacctgagttgtaaaaaactccagttgacacaaaatagactacgaaagtggctttaacatatctgaacacacaatagctaagacccaaactgggattagataccccactatgcttagccctaaacctcaacagttaaatcaacaaaactgctcgccagaacactacgagccacagcttaaaactcaaaggacctggcggtgcttcatatccctctagaggagcctgttctgtaatcgataaaccccgatcaacctcaccacctcttgctcagcctatataccgccatcttcagcaaaccctgatgaaggctacaaagtaagcgcaagtacccacgtaaagacgttaggtcaaggtgtagcccatgaggtggcaagaaatgggctacattttctaccccagaaaactacgatagcccttatgaaacttaagggtcgaaggtggatttagcagtaaactaagagtagagtgcttagttgaacagggccctgaagcgcgtacacaccgcccgtcaccctcctcaagtatacttcaaaggacatttaactaaaacccctacgcatttatatagaggagacaagtcgtaacatggtaagtgtactggaaagtgcacttggacgaac

SEQ ID NO: 2 - DNA, 1559 bp, Homo sapiens
gctaaacctagccccaaacccactccaccttactaccagacaaccttagccaaaccatttacccaaataaagtataggcgatagaaattgaaacctggcgcaatagatatagtaccgcaagggaaagatgaaaaattataaccaagcataatatagcaaggactaacccctataccttctgcataatgaattaactagaaataactttgcaaggagagccaaagctaagacccccgaaaccagacgagctacctaagaacagctaaaagagcacacccgtctatgtagcaaaatagtgggaagatttataggtagaggcgacaaacctaccgagcctggtgatagctggttgtccaagatagaatcttagttcaactttaaatttgcccacagaaccctctaaatccccttgtaaatttaactgttagtccaaagaggaacagctctttggacactaggaaaaaaccttgtagagagagtaaaaaatttaacacccatagtaggcctaaaagcagccaccaattaagaaagcgttcaagctcaacacccactacctaaaaaatcccaaacatataactgaactcctcacacccaattggaccaatctatcaccctatagaagaactaatgttagtataagtaacatgaaaacattctcctccgcataagcctgcgtcagattaaaacactgaactgacaattaacagcccaatatctacaatcaaccaacaagtcattattaccctcactgtcaacccaacacaggcatgctcataaggaaaggttaaaaaaagtaaaaggaactcggcaaatcttaccccgcctgtttaccaaaaacatcacctctagcatcaccagtattagaggcaccgcctgcccagtgacacatgtttaacggccgcggtaccctaaccgtgcaaaggtagcataatcacttgttccttaaatagggacctgtatgaatggctccacgagggttcagctgtctcttacttttaaccagtgaaattgacctgcccgtgaagaggcgggcataacacagcaagacgagaagaccctatggagctttaatttattaatgcaaacagtacctaacaaacccacaggtcctaaactaccaaacctgcattaaaaatttcggttggggcgacctcggagcagaacccaacctccgagcagtacatgctaagacttcaccagtcaaagcgaactactatactcaattgatccaataacttgaccaacggaacaagttaccctagggataacagcgcaatcctattctagagtccatatcaacaatagggtttacgacctcgatgttggatcaggacatcccgatggtgcagccgctattaaaggttcgtttgttcaacgattaaagtcctacgtgatctgagttcagaccggagtaatccaggtcggtttctatctaccttcaaattcctccctgtacgaaaggacaagagaaataaggcctacttcacaaagcgccttcccccgtaaatgatatcatctcaacttagtattatacccacacccacccaagaacagggttt

SEQ ID NO: 3 - DNA, 681 bp, Homo sapiens
atgaacgaaaatctgttcgcttcattcattgcccccacaatcctaggcctacccgccgcagtactgatcattctatttccccctctattgatccccacctccaaatatctcatcaacaaccgactaatcaccacccaacaatgactaatcaaactaacctcaaaacaaatgataaccatacacaacactaaaggacgaacctgatctcttatactagtatccttaatcatttttattgccacaactaacctcctcggactcctgcctcactcatttacaccaaccacccaactatctataaacctagccatggccatccccttatgagcgggcacagtgattataggctttcgctctaagattaaaaatgccctagcccacttcttaccacaaggcacacctacaccccttatccccatactagttattatcgaaaccatcagcctactcattcaaccaatagccctggccgtacgcctaaccgctaacattactgcaggccacctactcatgcacctaattggaagcgccaccctagcaatatcaaccattaaccttccctctacacttatcatcttcacaattctaattctactgactatcctagaaatcgctgtcgccttaatccaagcctacgttttcacacttctagtaagcctctacctgcacgacaacacataa

SEQ ID NO: 4 - DNA, 843 bp, Homo sapiens
aatgccccaactaaatactaccgtatggcccaccataattacccccatactccttacactattcctcatcacccaactaaaaatattaaacacaaactaccacctacctccctcaccaaagcccataaaaataaaaaattataacaaaccctgagaaccaaaatgaacgaaaatctgttcgcttcattcattgcccccacaatcctaggcctacccgccgcagtactgatcattctatttccccctctattgatccccacctccaaatatctcatcaacaaccgactaatcaccacccaacaatgactaatcaaactaacctcaaaacaaatgataaccatacacaacactaaaggacgaacctgatctcttatactagtatccttaatcatttttattgccacaactaacctcctcggactcctgcctcactcatttacaccaaccacccaactatctataaacctagccatggccatccccttatgagcgggcacagtgattataggctttcgctctaagattaaaaatgccctagcccacttcttaccacaaggcacacctacaccccttatccccatactagttattatcgaaaccatcagcctactcattcaaccaatagccctggccgtacgcctaaccgctaacattactgcaggccacctactcatgcacctaattggaagcgccaccctagcaatatcaaccattaaccttccctctacacttatcatcttcacaattctaattctactgactatcctagaaatcgctgtcgccttaatccaagcctacgttttcacacttctagtaagcctctacctgcacgacaacacataa

SEQ ID NO: 5 - DNA, 1617 bp, Homo sapiens
ctgatgttcgccgaccgttgactattctctacaaaccacaaagacattggaacactatacctattattcggcgcatgagctggagtcctaggcacagctctaagcctccttattcgagccgagctgggccagccaggcaaccttctaggtaacgaccacatctacaacgttatcgtcacagcccatgcatttgtaataatcttcttcatagtaatacccatcataatcggaggctttggcaactgactagttcccctaataatcggtgcccccgatatggcgtttccccgcataaacaacataagcttctgactcttacctccctctctcctactcctgctcgcatctgctatagtggaggccggagcaggaacaggttgaacagtctaccctcccttagcagggaactactcccaccctggagcctccgtagacctaaccatcttctccttacacctagcaggtgtctcctctatcttaggggccatcaatttcatcacaacaattatcaatataaaaccccctgccataacccaataccaaacgcccctcttcgtctgatccgtcctaatcacagcagtcctacttctcctatctctcccagtcctagctgctggcatcactatactactaacagaccgcaacctcaacaccaccttcttcgaccccgccggaggaggagaccccattctataccaacacctattctgatttttcggtcaccctgaagtttatattcttatcctaccaggcttcggaataatctcccatattgtaacttactactccggaaaaaaagaaccatttggatacataggtatggtctgagctatgatatcaattggcttcctagggtttatcgtgtgagcacaccatatatttacagtaggaatagacgtagacacacgagcatatttcacctccgctaccataatcatcgctatccccaccggcgtcaaagtatttagctgactcgccacactccacggaagcaatatgaaatgatctgctgcagtgctctgagccctaggattcatctttcttttcaccgtaggtggcctgactggcattgtattagcaaactcatcactagacatcgtactacacgacacgtactacgttgtagcccacttccactatgtcctatcaataggagctgtatttgccatcataggaggcttcattcactgatttcccctattctcaggctacaccctagaccaaacctacgccaaaatccatttcactatcatattcatcggcgtaaatctaactttcttcccacaacactttctcggcctatccggaatgccccgacgttactcggactaccccgatgcatacaccacatgaaacatcctatcatctgtaggctcattcatttctctaacagcagtaatattaataattttcatgatttgagaagccttcgcttcgaagcgaaaagtcctaatagtagaagaaccctccataaacctggagtgactatatggatgccccccaccctaccacacattcgaagaacccgtatacataaaatctagacaaaaaaggaaggaatcgaaccccccaaagctggtttcaagccaaccccatggcctccatgactttttcaaa

SEQ ID NO: 6 - DNA, 709 bp, Homo sapiens
atggcacatgcagcgcaagtaggtctacaagacgctacttcccctatcatagaagagcttatcacctttcatgatcacgccctcataatcattttccttatctgcttcctagtcctgtatgcccttttcctaacactcacaacaaaactaactaatactaacatctcagacgctcaggaaatagaaaccgtctgaactatcctgcccgccatcatcctagtcctcatcgccctcccatccctacgcatcctttacataacagacgaggtcaacgatccctcccttaccatcaaatcaattggccaccaatggtactgaacctacgagtacaccgactacggcggactaatcttcaactcctacatacttcccccattattcctagaaccaggcgacctgcgactccttgacgttgacaatcgagtagtactcccgattgaagcccccattcgtataataattacatcacaagacgtcttgcactcatgagctgtccccacattaggcttaaaaacagatgcaattcccggacgtctaaaccaaaccactttcaccgctacacgaccgggggtatactacggtcaatgctctgaaatctgtggagcaaaccacagtttcatgcccatcgtcctagaattaattcccctaaaaatctttgaaatagggcccgtatttaccctatagcaccccctctaccccctctagagcc

SEQ ID NO: 7 - DNA, 784 bp, Homo sapiens
atgacccaccaatcacatgcctatcatatagtaaaacccagcccatgacccctaacaggggccctctcagccctcctaatgacctccggcctagccatgtgatttcacttccactccataacgctcctcatactaggcctactaaccaacacactaaccatataccaatgatggcgcgatgtaacacgagaaagcacataccaaggccaccacacaccacctgtccaaaaaggccttcgatacgggataatcctatttattacctcagaagtttttttcttcgcaggatttttctgagccttttaccactccagcctagcccctaccccccaattaggagggcactggcccccaacaggcatcaccccgctaaatcccctagaagtcccactcctaaacacatccgtattactcgcatcaggagtatcaatcacctgagctcaccatagtctaatagaaaacaaccgaaaccaaataattcaagcactgcttattacaattttactgggtctctattttaccctcctacaagcctcagagtacttcgagtctcccttcaccatttccgacggcatctacggctcaacattttttgtagccacaggcttccacggacttcacgtcattattggctcaactttcctcactatctgcttcatccgccaactaatatttcactttacatccaaacatcactttggcttcgaagccgccgcctgatactggcattttgtagatgtggtttgactatttctgtatgtctccatctattgatgagggtctt

SEQ ID NO: 8 - DNA, 1141 bp, Homo sapiens
atgaccccaatacgcaaaattaaccccctaataaaattaattaaccactcattcatcgacctccccaccccatccaacatctccgcatgatgaaacttcggctcactccttggcgcctgcctgatcctccaaatcaccacaggactattcctagccatgcactactcaccagacgcctcaaccgccttttcatcaatcgcccacatcactcgagacgtaaattatggctgaatcatccgctaccttcacgccaatggcgcctcaatattctttatctgcctcttcctacacatcgggcgaggcctatattacggatcatttctctactcagaaacctgaaacatcggcattatcctcctgcttgcaactatagcaacagccttcataggctatgtcctcccgtgaggccaaatatcattctgaggggccacagtaattacaaacttactatccgccatcccatacattgggacagacctagttcaatgaatctgaggaggctactcagtagacagtcccaccctcacacgattctttacctttcacttcatcttgcccttcattattgcagccctagcaacactccacctcctattcttgcacgaaacgggatcaaacaaccccctaggaatcacctcccattccgataaaatcaccttccacccttactacacaatcaaagacgccctcggcttacttctcttccttctctccttaatgacattaacactattctcaccagacctcctaggcgacccagacaattataccctagccaaccccttaaacacccctccccacatcaagcccgaatgatatttcctattcgcctacacaattctccgatccgtccctaacaaactaggaggcgtccttgccctattactatccatcctcatcctagcaataatccccatcctccatatatccaaacaacaaagcataatatttcgcccactaagccaatcactttattgactcctagccgcagacctcctcattctaacctgaatcggaggacaaccagtaagctacccttttaccatcattggacaagtagcatccgtactatacttcacaacaatcctaatcctaataccaactatctccctaattgaaaacaaaatactcaaatgggcct

SEQ ID NO: 9 - DNA, 959 bp, Homo sapiens
acatacccatggccaacctcctactcctcattgtacccattctaatcgcaatggcattcctaatgcttaccgaacgaaaaattctaggctatatacaactacgcaaaggccccaacgttgtaggcccctacgggctactacaacccttcgctgacgccataaaactcttcaccaaagagcccctaaaacccgccacatctaccatcaccctctacatcaccgccccgaccttagctctcaccatcgctcttctactatgaacccccctccccatacccaaccccctggtcaacctcaacctaggcctcctatttattctagccacctctagcctagccgtttactcaatcctctgatcagggtgagcatcaaactcaaactacgccctgatcggcgcactgcgagcagtagcccaaacaatctcatatgaagtcaccctagccatcattctactatcaacattactaataagtggctcctttaacctctccacccttatcacaacacaagaacacctctgattactcctgccatcatgacccttggccataatatgatttatctccacactagcagagaccaaccgaacccccttcgaccttgccgaaggggagtccgaactagtctcaggcttcaacatcgaatacgccgcaggccccttcgccctattcttcatagccgaatacacaaacattattataataaacaccctcaccactacaatcttcctaggaacaacatatgacgcactctcccctgaactctacacaacatattttgtcaccaagaccctacttctaacctccctgttcttatgaattcgaacagcatacccccgattccgctacgaccaactcatacacctcctatgaaaaaacttcctaccactcaccctagcattacttatatgatatgtctccatacccattacaatctccagcattccccctcaaacctaa

SEQ ID NO: 10 - DNA, 1042 bp, Homo sapiens
attaatcccctggcccaacccgtcatctactctaccatctttgcaggcacactcatcacagcgctaagctcgcactgattttttacctgagtaggcctagaaataaacatgctagcttttattccagttctaaccaaaaaaataaaccctcgttccacagaagctgccatcaagtatttcctcacgcaagcaaccgcatccataatccttctaatagctatcctcttcaacaatatactctccggacaatgaaccataaccaatactaccaatcaatactcatcattaataatcataatagctatagcaataaaactaggaatagccccctttcacttctgagtcccagaggttacccaaggcacccctctgacatccggcctgcttcttctcacatgacaaaaactagcccccatctcaatcatataccaaatctctccctcactaaacgtaagccttctcctcactctctcaatcttatccatcatagcaggcagttgaggtggattaaaccagacccagctacgcaaaatcttagcatactcctcaattacccacataggatgaataatagcagttctaccgtacaaccctaacataaccattcttaatttaactatttatattatcctaactactaccgcattcctactactcaacttaaactccagcaccacgaccctactactatctcgcacctgaaacaagctaacatgactaacacccttaattccatccaccctcctctccctaggaggcctgcccccgctaaccggctttttgcccaaatgggccattatcgaagaattcacaaaaaacaatagcctcatcatccccaccatcatagccaccatcaccctccttaacctctacttctacctacgcctaatctactccacctcaatcacactactccccatatctaacaacgtaaaaataaaatgacagtttgaacatacaaaacccaccccattcctccccacactcatcgcccttaccacgctactcctacctatctccccttttatactaataatcttat

SEQ ID NO: 11 - DNA, 346 bp, Homo sapiens
ataaacttcgccttaattttaataatcaacaccctcctagccttactactaataattattacattttgactaccacaactcaacggctacatagaaaaatccaccccttacgagtgcggcttcgaccctatatcccccgcccgcgtccctttctccataaaattcttcttagtagctattaccttcttattatttgatctagaaattgccctccttttacccctaccatgagccctacaaacaactaacctgccactaatagttatgtcatccctcttattaatcatcatcctagccctaagtctggcctatgagtgactacaaaaaggattagactgaaccgaat

SEQ ID NO: 12 - DNA, 1378 bp, Homo sapiens
atgctaaaactaatcgtcccaacaattatattactaccactgacatgactttccaaaaaacacataatttgaatcaacacaaccacccacagcctaattattagcatcatccctctactattttttaaccaaatcaacaacaacctatttagctgttccccaaccttttcctccgaccccctaacaacccccctcctaatactaactacctgactcctacccctcacaatcatggcaagccaacgccacttatccagtgaaccactatcacgaaaaaaactctacctctctatactaatctccctacaaatctccttaattataacattcacagccacagaactaatcatattttatatcttcttcgaaaccacacttatccccaccttggctatcatcacccgatgaggcaaccagccagaacgcctgaacgcaggcacatacttcctattctacaccctagtaggctcccttcccctactcatcgcactaatttacactcacaacaccctaggctcactaaacattctactactcactctcactgcccaagaactatcaaactcctgagccaataacttaatatgactagcttacacaatagcttttatagtaaagatacctctttacggactccacttatgactccctaaagcccatgtcgaagcccccatcgctgggtcaatagtacttgccgcagtactcttaaaactaggcggctatggtataatacgcctcacactcattctcaaccccctgacaaaacacatagcctaccccttccttgtactatccctatgaggcataattataacaagctccatctgcctacgacaaacagacctaaaatcgctcattgcatactcttcaatcagccacatagccctcgtagtaacagccattctcatccaaaccccctgaagcttcaccggcgcagtcattctcataatcgcccacgggcttacatcctcattactattctgcctagcaaactcaaactacgaacgcactcacagtcgcatcataatcctctctcaaggacttcaaactctactcccactaatagctttttgatgacttctagcaagcctcgctaacctcgccttaccccccactattaacctactgggagaactctctgtgctagtaaccacgttctcctgatcaaatatcactctcctacttacaggactcaacatactagtcacagccctatactccctctacatatttaccacaacacaatggggctcactcacccaccacattaacaacataaaaccctcattcacacgagaaaacaccctcatgttcatacacctatcccccattctcctcctatccctcaaccccgacatcattaccgggttttcctctt

SEQ ID NO: 13 - DNA, 1668 bp, Homo sapiens
atgcccctcatttacataaatattatactagcatttaccatctcacttctaggaatactagtatatcgctcacacctcatatcctccctactatgcctagaaggaataatactatcgctgttcattatagctactctcataaccctcaacacccactccctcttagccaatattgtgcctattgccatactagtctttgccgcctgcgaagcagcggtgggcctagccctactagtctcaatctccaacacatatggcctagactacgtacataacctaaacctactccaatgctaaaactaatcgtcccaacaattatattactaccactgacatgactttccaaaaaacacataatttgaatcaacacaaccacccacagcctaattattagcatcatccctctactattttttaaccaaatcaacaacaacctatttagctgttccccaaccttttcctccgaccccctaacaacccccctcctaatactaactacctgactcctacccctcacaatcatggcaagccaacgccacttatccagtgaaccactatcacgaaaaaaactctacctctctatactaatctccctacaaatctccttaattataacattcacagccacagaactaatcatattttatatcttcttcgaaaccacacttatccccaccttggctatcatcacccgatgaggcaaccagccagaacgcctgaacgcaggcacatacttcctattctacaccctagtaggctcccttcccctactcatcgcactaatttacactcacaacaccctaggctcactaaacattctactactcactctcactgcccaagaactatcaaactcctgagccaataacttaatatgactagcttacacaatagcttttatagtaaagatacctctttacggactccacttatgactccctaaagcccatgtcgaagcccccatcgctgggtcaatagtacttgccgcagtactcttaaaactaggcggctatggtataatacgcctcacactcattctcaaccccctgacaaaacacatagcctaccccttccttgtactatccctatgaggcataattataacaagctccatctgcctacgacaaacagacctaaaatcgctcattgcatactcttcaatcagccacatagccctcgtagtaacagccattctcatccaaaccccctgaagcttcaccggcgcagtcattctcataatcgcccacgggcttacatcctcattactattctgcctagcaaactcaaactacgaacgcactcacagtcgcatcataatcctctctcaaggacttcaaactctactcccactaatagctttttgatgacttctagcaagcctcgctaacctcgccttaccccccactattaacctactgggagaactctctgtgctagtaaccacgttctcctgatcaaatatcactctcctacttacaggactcaacatactagtcacagccctatactccctctacatatttaccacaacacaatggggctcactcacccaccacattaacaacataaaaccctcattcacacgagaaaacaccctcatgttcatacacctatcccccattctcctcctatccctcaaccccgacatcattaccgggttttcctctt

SEQ ID NO: 14 - DNA, 1812 bp, Homo sapiens
ataaccatgcacactactataaccaccctaaccctgacttccctaattccccccatccttaccaccctcgttaaccctaacaaaaaaaactcatacccccattatgtaaaatccattgtcgcatccacctttattatcagtctcttccccacaacaatattcatgtgcctagaccaagaagttattatctcgaactgacactgagccacaacccaaacaacccagctctccctaagcttcaaactagactacttctccataatattcatccctgtagcattgttcgttacatggtccatcatagaattctcactgtgatatataaactcagacccaaacattaatcagttcttcaaatatctactcatcttcctaattaccatactaatcttagttaccgctaacaacctattccaactgttcatcggctgagagggcgtaggaattatatccttcttgctcatcagttgatgatacgcccgagcagatgccaacacagcagccattcaagcaatcctatacaaccgtatcggcgatatcggtttcatcctcgccttagcatgatttatcctacactccaactcatgagacccacaacaaatagcccttctaaacgctaatccaagcctcaccccactactaggcctcctcctagcagcagcaggcaaatcagcccaattaggtctccacccctgactcccctcagccatagaaggccccaccccagtctcagccctactccactcaagcactatagttgtagcaggaatcttcttactcatccgcttccaccccctagcagaaaatagcccactaatccaaactctaacactatgcttaggcgctatcaccactctgttcgcagcagtctgcgcccttacacaaaatgacatcaaaaaaatcgtagccttctccacttcaagtcaactaggactcataatagttacaatcggcatcaaccaaccacacctagcattcctgcacatctgtacccacgccttcttcaaagccatactatttatgtgctccgggtccatcatccacaaccttaacaatgaacaagatattcgaaaaataggaggactactcaaaaccatacctctcacttcaacctccctcaccattggcagcctagcattagcaggaatacctttcctcacaggtttctactccaaagaccacatcatcgaaaccgcaaacatatcatacacaaacgcctgagccctatctattactctcatcgctacctccctgacaagcgcctatagcactcgaataattcttctcaccctaacaggtcaacctcgcttccccacccttactaacattaacgaaaataaccccaccctactaaaccccattaaacgcctggcagccggaagcctattcgcaggatttctcattactaacaacatttcccccgcatcccccttccaaacaacaatccccctctacctaaaactcacagccctcgctgtcactttcctaggacttctaacagccctagacctcaactacctaaccaacaaacttaaaataaaatccccactatgcacattttatttctccaacatactcggattctaccctagcatcacacaccgcacaatcccctatctaggccttcttacgagccaaaacctgcccctactcctcctagacctaacctgactagaaaagctattacctaaaacaatttcacagcaccaaatctccacctccatcatcacctcaacccaaaaaggcataattaaactttacttcctctctttcttcttcccactcatcctaaccctactcctaatcacataa

SEQ ID NO: 15 - DNA, 525 bp, Homo sapiens
cctattcccccgagcaatctcaattacaatatatacaccaacaaacaatgttcaaccagtaactactactaatcaacgcccataatcatacaaagcccccgcaccaataggatcctcccgaatcaaccctgacccctctccttcataaattattcagcttcctacactattaaagtttaccacaaccaccaccccatcatactctttcacccacagcaccaatcctacctccatcgctaaccccactaaaacactcaccaagacctcaacccctgacccccatgcctcaggatactcctcaatagccatcgctgtagtatatccaaagacaaccatcattccccctaaataaattaaaaaaactattaaacccatataacctcccccaaaattcagaataataacacacccgaccacaccgctaacaatcaatactaaacccccataaataggagaaggcttagaagaaaaccccacaaaccccattactaaacccacactcaacagaaacaaagcatacatcat

SEQ ID NO: 16 - DNA, 458 bp, Homo sapiens
  misc_feature (1)..(458): n is a, c, g, or t
gactngtaaattanttaaaagatgagagataatttgtttcatttctattcccttttctgtaaccaagatgaaggccaaagtggtcttaggaaccttttgtcttcctgatgagttcttctatggtgtcccactgctccttggtgacctttctcaggtcgttgaattcccctgaaataagtacttcctctccaccgtcaaatttaatgactgctccattaatccaagaaggcataatcactacaaaggaaagcaggcaaggatttgcgagttcttctacagtccccagggcgaaccacaggggaattctgccaatcatttctttctcaaatgttcccgttggggtccagacgggtaaagggcacctttgggnttttatagggcccggggtgaatcacattgaattcggatttccatatttaaccccnttcaggtggcaaggggatttgntcaagggtttc

SEQ ID NO: 17 - DNA, 109 bp, Homo sapiens
  misc_feature (1)..(109): n is a, c, g, or t
tttcagttatgggacaaaaatattatatcaaaacactgaagctttgcaatctaaattcttttcaccncttcanaaagcgatgctaccacctaatagttttcaaggaaaa

SEQ ID NO: 18 - DNA, 422 bp, Homo sapiens
  misc_feature (1)..(422): n is a, c, g, or t
ttttttttggtgttagagattatttattattactcttaggggaatgaattctggacaagggatgtgaaaattccagaaaccctcgattgtgaccaaaatgactgtaaaatatggagcacagcctgtcactatatgaatataaatggcctttgnaagaggtaagttctttggaaagaatggtctccagctatatgtctcaagcttcatggagaggggcagggatgaatggcagggaggaagcaggaggtctcaccagcagaatccaggagctcactggggacccatcccaattcttaaagcatgggtaattcagccaggcctcagcctcttgtgccagctgcctccaaccctttggncctccaccacccaagtttcctgtagggtccgccgggtccaggatcacaggcctgggtttcgtgagc

SEQ ID NO: 19 - DNA, 403 bp, Homo sapiens
  misc_feature (1)..(403): n is a, c, g, or t
atnnnagcanacaggtctgggaggcagttctgttgccactctctctcctgtcantgatggatctcaganataccccagccaaatctctggacaagttcattgangactatctcttgccagacacgtgtttccgcatgcaaatcaaccatgccattgacatcatcctgtgggttcctgaaggaaaggtgcttccgaggtagctcctacccntgtgtgtgtgtccaaggtggtaaagggtggctcctcangcaaagggcaccaccctcagaggcccgntctgacgctgaccttggttgtcttcctcagtcctctcaccacttttcagggatcagttaaatcgccggggaaaattcatccaggaaattaggnagacagcttgganncctgtcanggagngagngca

SEQ ID NO: 20 - DNA, 584 bp, Homo sapiens
  misc_feature (1)..(584): n is a, c, g, or t
ggtgttagagattatttattattactcttaggggaatgaattctggacaagggatgtgaaaattccagaaaccctcgattgtgaccaaaatgactgtaaaatatggagcacagcctgtcactatatgaatataaatggcctttgcgaagaggtaagttctttggaaagaatggtctccagctatatgtctcaagcttcatggagaggggcagggatgaatggcagggaggaagcaggaggtctcaccagcagaatccaggagctcactggggacccatcccaattcttaaagcatgggtaattcagccaggcctcagcgtcttgtgccagctgcctccaaccctttggtactccaccacccaagtttcctgtagggtccgccgggtccaggatcacaggcctgggtttcgtgagctgccttctcaggtacttatcaataatggggtttttaagtcatgatactatgtcgagtagatgcagagatgctggtagtatatgactaattcgagaccgtcggaaatccatgngctgtgattgaatgtgatatcatgctcgtcgctcccaagcatagacggtaggagctc

SEQ ID NO: 21 - DNA, 486 bp, Homo sapiens
aaagtctcaagacacttttaattgtcacaactgggtggcatctactgggtacaggccagagatgctgctcaacatcctacaatgcacaagagagcctccaaacaaagaactgtctagccccaaatgtgagtaagtatcaaagttgagaaatcctgctttaaagaaagaacctggtggagagaaccaagtatatctggagggaggatatcctggtggaatatatcaggtatatcttggtaggtccggagggctttggagaggtgtggcagacatccttgggtggccagtgcaacccacgtccacagtcatctttgtagccaccttcaagttacaggtagccacatgacatttctgagcaatgaaatggaagaaaatttgcggatgaaacttctaataaaatcactgtgttcttgacctttgggtatcttttccttcttcctgcttggattgcaaacctgccatctggaggcaccgtggccgctttca

SEQ ID NO: 22 - DNA, 637 bp, Homo sapiens
  misc_feature: n is a, c, g, or t
  misc_feature (1)..(637): n is a. g. c. or t
aaccaaaataaataaatcagatctgtccctgtgaaggtcagagtgataaatgaggggcagctggccccttggccatggcctggcccctcacccccagcccctcctctccctcttctgacctgctttggcacagcaaagaaaatgatgcatcagaaagtctccattgggttaaaggagaaagaaagagtggttggggtggggagggagtccaagagaggaggtggagggttaacaggaccaaaacagaacagccagtgccccggcggtggctacctgagcggggcttcctggctacacacagactctgtgggctccaggtgctgcctgggcccaggaggggtggtggggcatgcttgggccccacacacagcctggaaccctcgaaggaacagcagataatggacactgcagagactgaagctgccctttctgtgccaggtcaggccaaggctctctcctgccagctgccccgggtcattctcagtttacgccacggctggggcccaccctagaaacctctggcagccatggctagatccgaattcaggcttctctacagattctaagctcangcttaagatgaagctattctagtctcaaatacaggaacccgtgctttgctggtgacagcggaagc

SEQ ID NO: 23 - DNA, 408 bp, Homo sapiens
ttttttttttttttcatctttcatggtctttcattcatctcatcaattaggacacacaaggcagcatctttctctataatctgatctctcctatgacctgaattttctctttgatgttcattctgtccagtacaattgttgctatcatcagcatccattggttcagtttttactctcattcctgcttctgaatgaggcaaatcatcaggcaaagaagccaagcaattctgaatcatttcaattactcgttccaggtgcttttgaaatctctcagctgtttcaagccgttgacgtttctggacctccatcatgactctcaaggtctctcttgcttggtggggtcggtattcatttataagatgatgcacgtgtacaaaaagcagcttaagatcttctagtttctcttct

SEQ ID NO: 24 - DNA, 464 bp, Homo sapiens
  misc_feature (1)..(464): n is a, c, g, or t
ggctgggaactggggaggcatggctgagttcggcctccaaaggcggtctttcgtctttctctcccgagtctctccgagagtgcggtctctccgagagcgcggaggctcggggtggacagcctggaggagggggctctaagcgtggcagtctcggggcttcctccgtgttgggacgccgagccggagtggaggttgggagacctggcgtctagtccccgcgccgctgtttttctaagctgtgtggccttggcgagtcatttgccctctccggctctttgtaacatgagagtagccctccctgcccttccttcttctgggagcagttatgaaacagctgaggttcttgatagtccacaatngggtgaaccacagcaagtgagtgcacttccaccacctccaatgcaatatatcaaggaatatacggatgaaaatattcaagaaggcttagctcccaagcctccccc

SEQ ID NO: 25 - DNA, 438 bp, Homo sapiens
ttggtattaacttccttttcattatttactgaaactagaaaaaagtattctataccaaaatgtatacaatttagtaattgtacaaaacattaatccagcaagatattaattacagtcactaaaatgaacactcaacatatttttcactgccacttccatgaaaagctcagaaaaagtcactggctaaaaagtcacaacaaaagcaatttaagctttacgtacaacagaaaaggtaaatcttccacaataacaatgcagacacaatcactaagaggctctccatgctgccatggtttcctggaatgtttttcagagtccatcttctacaagagacatcatcagctttccaagagcaacacttgaagcattagatgtaatacaaaataaggagttctttattatttatacaaaacttgtacattaaaaaaaattaagatt

SEQ ID NO: 26 - DNA, 399 bp, Homo sapiens
tttcgaaacatttctctaaaactttatttcaaagttattcacctcaccgttaataaggtgtatgattaatgctctgtgccagtatttgcaggcctgcccattgccggcaatggactttgagaaaacccatttcctggcacccaaaagttaaattactcttttcaaaacataccgatctccccaacacttgcaaaagtattacatgcaccattttgccaccattctttaaatcagaacttacattattaatctacatcagtgaatgttaaatgaagtcattttaacaaattatgactgtacaaatcaaaatactactagttaatattagacaagagtatcttacaaacactactattacatattaccttgcaatctggaaacattatatttcatatttgg

SEQ ID NO: 27 - DNA, 248 bp, Homo sapiens
  misc_feature (1)..(248): n is a, c, g, or t
aaatggaagggaagaataggggcagggcattattaggctatttctgatgcttcagtgttataaattcaacatagaggctgacaacctaaattcatggtgtaacacagctcttttccttttccttttttttttntttttggtatcngttcaatgaaaatanaggatgancccaagtttttaccctagtctgnctagaagtattccacttcaaggnctgaagtaggacttttacctttaaaaacnacaac

SEQ ID NO: 28 - DNA, 454 bp, Homo sapiens
cagatccatggaaagcttcctgggaaacgtatgctagcagacttctccccgtgaatcatatttttaagatcccactcttagctggtaaatgaatttgaatcgacatagtagccccataagcatcagccctgtagagtgaggagccatctctagcgggcccttcattcctctccatgctgcaatcactgtcctgggcttatggtgctatggactaggggtcctttgtgaaagagcaagatggagcaatggagagaagacctcttcctgaatcactggactccagaaatgtgcatgcagatcagctgttgccttcaagatccagataaactttcctgtcatgtgttagaactttattattattaatattgttaaacttctgtgctgttcctgtgaatctccaaattttgtaccttgttctaagctaatatatagcaattaaaaagagagaaagaga

SEQ ID NO: 29 - DNA, 425 bp, Homo sapiens
ttttctctttctctctttttaattgctatatattagcttagaacaaggtacaaaatttggagattcacaggaacagcacagaagtttaacaatattaataataataaagttctaacacatgacaggaaagtttatctggatcttgaaggcaacagctgatctgcatgcacatttctggagtccagtgattcaggaagaggtcttctctccattgctccatcttgctctttcacaaaggacccctagtccatagcaccataagcccaggacagtgattgcagcatggagaggaatgaagggcccgctagagatggctcctcactctacagggctgatgcttatggggctactatgtcgattcaaattcatttaccagctaagagtgggatcttaaaaatatgattcacggggagaagctctgctag

SEQ ID NO: 30 - DNA, 297 bp, Homo sapiens
  misc_feature (1)..(297): n is a, c, g, or t
agccntttattgagggccttcttggtgtggaagtgctgcactgagtctgcagggacagaggaatgggcaggagcggggccgggggtagaccacctggcaagactggcaaggcagtgggctgagtctgccagagaagatggggagctgctgcccgcccagggcatnggcatctgggctgagaagggcaggagggtgggtgacaacaatgtgcaggtctntgggggacacagcggcagtacacagagaggtagtngggactgggagagttgttttgcagggatggcactcnagggtctt

SEQ ID NO: 31 - DNA, 446 bp, Homo sapiens
  misc_feature (1)..(446): m is a, c, g, or t
cgaacacaaggctctgtggccctgtctgtgacccaggaccctgcctgcaagaagcccctggggtgaccctcttgccatggcctgaagcagccacaggtgtgccaagcaccctcgagtgccatccctgccaaacaactctcccagcccccactacctctctgtgtactgccgctgtgtcccccacagacctgcacattgttgtcacccaccctcctgcccttctcagcccagatgccatgcccctggggggngcagcagctccccatcttctctgggcagattcaggcccattgccttgccagtcttggccagggtgggtttacccccgggccccgcttcctggcccatttcctnttgttccctggcaggatttcagttggcaggcattttncaacaaccaaggaaggggcctttcaattaaagggttttcttggaggggaacggna

SEQ ID NO: 32 - DNA, 783 bp, Homo sapiens
tttttttgcgttcctcaggaagcctttattgagggccttcttggtgtggaagtgctgcactgagtctgcagggacagaggaatgggcaggagcggggccgggggtagaccacctggcaagactggcaaggcagtgggctgagtctgccagagaagatggggagctgctgcccgcccaggggcatggcatctgggctgagaagggcaggagggtgggtgacaacaatgtgcaggtctgtgggggacacagcggcagtacacagagaggtagtgggggctgggagagttgtttggcagggatggcactcgagggtgcttggcacacctgtggctgcttcaggccatggcaagagggtcaccccaggggcttcttgcaggcagggtcctgggtcacagacagggccacagagccttgtgttcgctcccaggcatacgaggtcccagctagcaccaggaggctgtcatcaggggccaggctcaggcgccgtccccccattgtcaccaccgaggagccctccagctgccacagccacacgtccacattctgtctcaagccttcgctgctgccttgcccataggcgatcacctgggtctcataggtgtccccaaacaggctgagtggtgtgccttgctggagcttccctgtggtgctgtccaggcaagcatccaaggacatgggcttcatgaattgatgtgttgctcaaaggaatggtggctccttgagcagcttgtcaaggaatggcttttcttgtctgtactgctcagagctgaagaacttctggat

SEQ ID NO: 33 - DNA, 372 bp, Homo sapiens
  misc_feature (1)..(372): n is a, c, g, or t
ttggaatgcaaatgtgaagtatttccacagccgtngcagggaacacataactggcactatttataagcgataaaagggttatttcatgcatcctctttaagctgcaaatgcttcatttacaaaagaaaaaaaccagtccttttcattcatgagactggcttaaggatcaaatgagatctgtttttaatataaagatgttttcttaaaatctctgtatgaaattatctccggagagatagattcaccatgtttgctctgagatttagaggcctctgcctgccactccacaccctgtttgtgaaggcccangtcactcactatggcaaagaagtcattccctctaggttaggtgtntaaaaccaggttatgggg

SEQ ID NO: 34 - DNA, 373 bp, Homo sapiens
  misc_feature (1)..(373): n is a, c, g, or t
gttgaaagaatacacagaaagcctggaaaatttttccaggggtntcaatacgccctgtcaactgagaattaagaggatccggctggtcacttgcctggagaggatcctgcatgctgatagtgctgaggcnnctgccagctaagaaccaccgggaggaactgggccattctaacacccgttgctaccatgctggccacccgcctctccagacccctgtcacggctcccaggaaaaaccctaagtgcctgtgatagagaaaatggagcaagacgnccactattgctttngttctacttccttttatcccgatttngccgtcggacttatgccagttncggcttgncgttttgtgccagcnaaaaggttgttcctt

SEQ ID NO: 35 - DNA, 437 bp, Homo sapiens
  misc_feature (1)..(473): n is a, c, g, or t
tatgatgtgccattcaacctttaattacataagctgttttcaaaaatcacattcagcgtggagattttccagagatgctggagttggcagatggcaccacgtagctctccactttccacaaatggcctctgccagcttgggaagaacctccatgacctgtgtcctgagaagtcagagagcaagggccccacggcactggcagggtggagccgtgtagagggtggccaggtgcgactnncgcggattccatccagagaggagactcaaggatcatgctaagtagggaacggggttcagcacgtcctcaggcattcaactcctgggccagggtccgtaacaaagggagacttcagccctcaaagcctctcactcctcaggtctgggcaggaggtccttctgccaagcagctcctcctgcccttcgcctgctttctgcca

SEQ ID NO: 36 - DNA, 389 bp, Homo sapiens
aggaaggcgcttccgcggcgactggtgggcttggcgtccctccgggctgtcagcacctcatctatgggcactttaccaaagcgggtgaaaattgtggaagttggtccccgagatggactacaaaatgaaaagaatatcgtatctactccagtgaaaatcaagctgatagacatgctttctgaagcaggactctctgttatagaaaccaccagctttgtgtctcctaagtgggttccccagatgggtgaccacactgaagtcttgaagggcattcagaagtttcctggcatcaactacccagtcctgaccccaaatttgaaaggcttcgaggcagcggtcaccaagaagttctactcaatgggctgctacgagatctccctgggggacac

SEQ ID NO: 37 - DNA, 426 bp, Homo sapiens
  misc_feature (1)..(426): n is a, g, c, or t
cgcattattactgaaaaggctgtgtttgatgtggacaagaagaaagggttgactctgattgagctctgggaaggcctgacagtggatgacgtacagaagagtactgggtgtgattttgcagtttcaccaaaactcatgccaatgcagcagatcgcaaattgaaatatggatatttgtaccaggctgcgtgtttttcattttaaacacacaagatttaattgaaaggacatcaataatcataattgtgtatttaacaggtggttttttattagttttcttgtgtttcagactttatggcagccatattaaactgttctctagggcatgctgtggacatttttaattaaaaagccaaaagggagccntttttaanttatcctccatttgtttaagggcctgaggagggtttgtttttttattattggg

SEQ ID NO: 38 - DNA, 393 bp, Homo sapiens
  misc_feature (1)..(393): n is g, c, a, or t
tttttttttacatcactttagaatatttattgtattccttaatgcatttcttaacatgtatagcactctttaatcaagaatataaagtcatctacttaggaatcacattatcttaaagatgcatactgggaatgataagtttgaagatgtaactatcaacaattcttttcaaaatcatatcaatatattactctcatgggaacttgacacattctaaggnggggtcattttttccccccagatacngggaagggtatggcatttaaccatgtggggtcagnccagnaaagggtgtttttatatagggtggtggtggttactccattaaaaggccctgtcccttttctctaatnttggtaccattacaccaatggtggggctaccncccggaaa

SEQ ID NO: 39 - DNA, 441 bp, Homo sapiens
  misc_feature (1)..(441): n is g, c, a, or t
tgcatctcagaaaggtttattatcaactgaaggaggtaacatgtagcctttgctggggacaaagatgtgacaagtctctgccccatcctaggtgctgccctgcgtaggnctcttcccaggcccgccccccttggcagcctggtagcgctgggctggcgtggcatcctctggctggatccctcgtggttgctgcgttccncagggccaatactcccccgagggcagcgctgcctttgtctctccctcgggtctcgggcacgctcgacgtgggcagagacacggccgcaggtcctggggctcgctcgctagcctctgcccggcacacatggacttgagcatctggaagacggcgaggggggncacgttcagcttcagcaggtccaccaggatcttgaacacgtcggggtcgataccgccgcccgccgccttgagccagctcgt

SEQ ID NO: 40 - DNA, 399 bp, Homo sapiens
  misc_feature (1)..(399): n is g, c, a, or t
gatggcggcnaggggtacgggcctgggcggcngtcgnggcgccccgggnatggaggcggcccggcagaagctggcgctgcggcaacgaaggtgctgagccgaagagagatggagctgtacgagctggctcaggcggcgggcggcggtatcgaccccgacgtgttcaagatcctggtggacctgctgaagctgaacgtggccccccgtcgcccgtcttccagatgctcaagtccatgtgtgccgggcagagnctagcgagcganccccaggacccntgcggccgtgtctctgcccacgtcgagcgtgccccganaccccgaagggagagacaaaggcagcnctgcctcgggggagtattggcctgcggaacgagcaaccacgagggatccagcaganatg

SEQ ID NO: 41 - DNA, 510 bp, Homo sapiens
  misc_feature (1)..(510): n is g, c, a, or t
aaataaaaatgctgcaaggtttccgcctctgcgttccccttgtgatggctggcaggtggtctggaagcgtcccggatggcggccaacgcatgggggcaggtgtcctggcagcgaagggcagcccggccgcanncgtcactgcacagcggcgtccgggtggctctggtatcgctgcctccaaacctcctggatcttcctgcaccacttgtgtgcgttcccgctggggtccatcagataatacgtcctgttaagcgtgtggacaaagaagttttaaaattcttggcctctgggtcgaaagttcttggtgaccnaagaatttcacctttcagaaacttttgttgacaaggatccacataatataaaatgtgggtccttcttgtggaagcaacaactgttccgtcggtctttgcnaataaanccctttccgcttaatccactnggggcccaacttttaagtaattaaattaattttctaanaactgggtggccaagggttttccggcaagcctg

SEQ ID NO: 42 - DNA, 439 bp, Homo sapiens
  misc_feature (1)..(439): n is g, c, a or t
ggttttagatgccacaaagcggttaggctgtgaggaaatggaaggatacggacctcttaaagcacacccgttcttcgagtccgtcacgtgggagaacctgcaccagcagancgcctccgaagctcaccgcttacctgccggctatgtcggaagagacgaggactgctatggcaattatgacaatctcctgagccagtttgntgcatgcaggtgtcttcgtcctcctcctcacactccctgtcagcctccgacacgggcctgcccagaggtcaggcagcaacatagagcagtacattcacgatctggactcgaactcctttgaactggacttacagttttccgaagatgagaagaggttgttgttggagaagcaggctggcgggaaacccttggcaccagtttgtagaaaataatttaatactaaagatgggcccagtng

SEQ ID NO: 43 - DNA, 426 bp, Homo sapiens
gatggttaagtcaattctgttaaaactcaaggcttatattaagcaaacacttgaagtgagaagatgatccacaacttgagaagacatttataatacaaataactgatgaaggattcataatcacaaatatagagaattcctatttaaaaaaatagaaaaatagtgaagactacacaagaggaaatagggcttttaaataaatagatgttctgtagcattggtcagggaaatatgaattaggaccacaatgagattccattttatatccataagatttgcaaaggttgggtctgacagtaccagttgttagatctgtagggacttgtacaacattgtggatgtgtaaacaggcaccactgctttaaaaaacaattatcccttacagacttgaacatttgcagaccttatgatcttgcttccaactcc

SEQ ID NO: 44 - DNA, 414 bp, Homo sapiens
aggttatcattccactttgcctttattttttataatatatttaagtagaacatatttaatatgtaaaaaactgttatctattagttataaagtataatgtattaatagcatatagtaaacacttgtaagcctaccaggaggaaccagaacagctgcataacttggcatctacctatgtgctcctgtcccttccacttcctccttctgtgggtaattactatgctcaattttggtttatcagttaccttcttttttttttaatagcatagttttattgtatacgtatgcttagactacatattctttggttttgcttgtttttgggctcaataaaaatagtacgccccatgtggtctcttcaaacttgcttttttccttaatattttctgagattcattcttattgtgaggtata

SEQ ID NO: 45 - DNA, 410 bp, Homo sapiens
aattcaatgagttacttttttttttttttaaacagatttgtacagcaaaaagttcccagatcacagtctctaccatacagtcacctgtccagtgtgcaggaagccacaggggccctggccagaggggccaagagcagaagctgcactgcagagtttacttctacctacaggtaaacagtggctggaagaatcttgagttccctttgttctccagtgtatcttgtacaaaatattacatttgtttaaacacatatttacagagtttgcacaaatagaaaatggttacaaattacaaccaggcttggcaggataccagttcccctccccactgaccaaggtcagatgtgatgaccatttcatatttacagttgcaatttaaaaagtctgtgtttagagacctaaatgaagtt

SEQ ID NO: 46 - DNA, 449 bp, Homo sapiens
cccggtccctgccgggcccctctccgtgccgccgctcccccccctcccttccccgcgctggcccctcgccccgccgctgtccctctgttcctctccgcctggcctcccccccttgcccccccccgtggccctcccggtcctctgtgccgcccctggtgcggccggggcctggtggcgcgcccccgtggttgcctcctccgcggcgccccccgccgtgacgcttcgctccgtggcctccggcggctctccgcgggtgcccgtcgccgtgctccggcccctccggtctgcctttgtccccctgccgtttccgggcgccgccgtccttctggcccgtgtgctgcccctgtccgccgctgccccgttttccccggccgccgctgccgccctgcgcgcgctgccggggcctcccgccctgcttgctccggtgccccgttcccgtccccctggtc

SEQ ID NO: 47 - DNA, 638 bp, Homo sapiens
ttttaagaagaaaggcataaaggagagtttaattccacgagcaaatgcaatgggttttaattcttctcggagcttaaccagttcagtaaggtcaatctcatcacaataaccaaaatgaggtatcttcagggctgcagacatagtcttgaccattgctttttgaaagccttttatgggttctgttttgtctttgcctgtgaataccggaggttttgatactagtataggaacagtcatgtcttttggctttggtggaggtggcataatttcaactttgggtgaaggaggcaatatagctcctgtctgcttttccaaatagttgaggatatcttctttaagtattctgccatcttttcctgagccaacaacttcactcagcttaatattgttttccattgccagacggcgaactgcaggagttgccagtgtttttcggccctttatctcttggtgtgtatgttcatcatgagacactgcaggagtttcaacaacatcttcttctgaatcttttaaagctttcgtttctatgtctactaatggcttccccacataggcaatatcgtctagattataatagagttttttaatgactccatcataacgactagtgatggaacagaagcttatcactttgaact

SEQ ID NO: 48 - DNA, 674 bp, Homo sapiens
  misc_feature (1)..(674): n is g, c, a or t
ttttcttggttgcagctgttttatttccagcatgttcccaacctggtgaccctccacagtccagcagtagagagatgggtaaggggttagatcggcccacacctccacctgtccctaaggttacctcagttgctgaaagctaaaaccttgcgcgcaagggcgaccttccccaggagggaggagagacgctggaagagcagccaagcctccaagccagggccggccgggatcagcagaggtgcaaagtcccactcagacggacccagcccttcccctcccaacactcatcccttccctgctgggggccggggctggggctgggctcagtggcccaggaggcgcagcatctcctgaggatccaccagcttctccctgggcttccccgtgccctggccccgggccacctcctcggcatccagcttctcccagtctgagaaagagactggccggacccctcggctgctgagcagggcctggatggctgcgtagccaggcctggggccagaggggagcaacccagccttcaggtcctgcagcagcatctggccggtgaggaagctgtcagtcatggtgtggctatgacaccctgtagtcctctcttcacccagccgctgcagtagaagcctggcacatncataacccgncccttcacattgggatgaccccaagcttgg

SEQ ID NO: 49 - DNA, 656 bp, Homo sapiens
  misc_feature (1)..(656): n is g, c, a or t
tttttttttttcaaataaggctaatttatttattacatggatcctgaccttgagttaagtattcagaacaaaaataaaatgtcccagcctggatagagtgacaatactttctctccatttctatctcaagctattaaagattacctgcggcagcattcttttgttggaacttggttaaatacatgttcattcctttcttaaagtccttatccccaatgtagtcatgcagcattcggatgacagatgcacctttgctatatgatatagcatcaaatatctcatcaacctcagatggatggcccacactgacctggcagacagtgtgattcagggttatgacaggaagcagatagcctgtaatattcaataggatggctgttatctaaggcgtcaagctcctgggcacgggtgtaatcagcagaaacaaactgagtccaaatatcatactctgggaagcagtggtctacacacagatattcaatccaggatgcanaaccttcatttaaccaaagatgagtccaccattccatagtaacaagatttccaaaccattgatgggcaagttcatgtcccacaaccagagcaacccactggcgggatgaagaacaggaaatttttggatcaataagcaatgcagtctcccttatagtaacaac

SEQ ID NO: 50 - DNA, 596 bp, Homo sapiens
tttcttgcttttttcagccttgacaactcccttttttgctgcatcaggctttcctttagctcgatatgcagcaatatccttttcgtatttttccttcagcttcgcagccttcttttcataaggctgcttgtcatctgcagcagtgttattccacatctctcccagtttcttcgcaacatcaccaatggacaggccaggatgttctcctttgatttttgggcgatactcagagcagaagagaaagaaggccgaaggaggcctcttgggtgcattgggatccttgaacttcttttttgtctcccctttgggagggatataggttttcatttctctttcataacgggccttgtccgcttttgccatatcttcaaattttcctttctctttagcagacatggtcttccacctctctgagcacttcttagaaaactctgagaagttgactgaagcatctgggtgcttcttcttatgctcctcccgacaagtttgcacaaaaaatgcatatgatgacattttgcctctcggcttcttagatctcctttgccccatgttagtatttttcctcagcgaggcacagagtcgcccagtgcccgtcc

SEQ ID NO: 51 - DNA, 408 bp, Homo sapiens
  misc_feature (1)..(402): n is g, c, a or t
  misc_feature (1)..(408): n is g, c, a or t
ggagaagcaagatgaatgcaggctcagatcctgtggtcatcgtctcggcggcgggaccatcataggttccttcaatggtgccttagctgctgttcctgtccaggacctgggctccactgtcatcaaagaagtcttgaagagggccactgtggctccggaagatgtgtctgaggtcatctttggacatgtcttggcagcaggctgtgggcagaatcctgttagacaagccagtgtgggtgcaggaattccctactctgttccagcatgggagctgccagatgatctgtggggtcaggcctaaaagctgtgtgcctttgcagttccagtcaataggggatagggagattncagcattgtnggtttgcagggaggcatnggaaaatattgaggcaaggctncttcantttg

SEQ ID NO: 52 - DNA, 336 bp, Homo sapiens
  misc_feature (1)..(336): n is g, c, a or t
ttttttttttttttttttgattgatctgatgttccttttatttataacaatgttaaatgcaattgtcttgtaccttgagttgagtattacacattaaagtaaagtacaagctgtaaacttgggtttttgtgatgtaggaaatggtttccatctgtactttggtcctctgatttcacatattgcaacctagtactttattagtttaaaaagaaattgaggttgttcaaagtttaaggcaattcattctctctggancacacattgctattcccatcccacccccaatggcacaggggctgcaacaccacgacttctggcccattctctccngtgtgt

SEQ ID NO: 53 - DNA, 318 bp, Homo sapiens
  misc_feature (1)..(318): n is g, c, a or t
tttttttttgaagttaaggcaacatttatttgatttccttataatcatattatctaaggcagaagtggtggttacttggcaagaatacgatttcttttaatgtcttctatagttgagttttagctcagaaatacatcatatttcactggttcaaatctgagagaatgtacttctagcatgggctcctattcatgatcaatgcatttttgtgtcaccatggacttgatcaaacttaatcactgtttcaatggtcagggcatggccagnttgtggcagctgctctgaaggntcacttgttttactgtgggccgggncaag

SEQ ID NO: 54 - DNA, 463 bp, Homo sapiens
  misc_feature (1)..(463): n is g, a, c or t
cagaaacttcctccagtattcaagaaagatggaactgttactgcagggaatgcatcgggtgtagctgatggtgctggagctgttacagaaacttcctccagtattcaagaaagatggaactgttactgcagggaatgcatcgggtgtagctgatggtgctggagctgttatcatagctagtgaagatgctgttaagaaacataacttcacaccactggcaagaattgtgggctactttgtatctggatgtgatccctctatcatgggtattggtcctgtccctgctatcagtggggcactgaagaaagcaggactgagtcttaaggacatggatttggtagaggtgaatgaagcttttgcttccccagtacttgggctgttgagaggagtttggatcttgaacattaagtaaaaccaatgtgaatgggagggagccattgctttgggtcacccactgggaggn

SEQ ID NO: 55 - DNA, 348 bp, Homo sapiens
ctggttttggattcttgttttccttgcaagaacaaaaggttctctagaatccttcagccaccaatgaaatgatcaggcaggagaaaaactttagatgggagtcttgtcatcaaaaataaatacagttgcatggagctgcttaagatctgaaccaaactcaaaataggaagacgggggctaaaaagttattttaagaacccccccaccacaaccacagtcactccgtgggctaagcggggaacaaggaagcatgtctggtcacaccatcttggaataggaagccatggctggaccggatcggatccactgatggcacacgtggaagctgaactttgacgccagcggggg

SEQ ID NO: 56 - DNA, 464 bp, Homo sapiens
tggagtgcagcgtcacaaacatggctcactgaagcctcaacttcccgggctcaagtgatcctcctacctcagactgccgagtagctggggctacaggcacacgatgccctgcctggctaattttttagtttttgtagagatggggtctcactgtgttgcccaggctggtctcaaacttctgggctcaagggatcttcccatctcagcctcctaaagtgctgggattacaggcatgagccactgtgcccagactcaccttaatttttaaaaatgttcatggtggaggaaggggcaggaacatccaccagcaccagccagggttctctgaaaaaggcgctgaatattttgctcagctctgtgcttctgtgctcgagccaaccacacgtatactttgaacacgaaggaatgtgcttgagcattaaggaatgtaagccacaggttcatgcctggctgccttccaagga

SEQ ID NO: 57 - DNA, 444 bp, Homo sapiens
  misc_feature (1)..(444): n is g, c, a or t
cgcatnagaaagagatcaccgcgctggcacccagcaccatgaagatcaagatcatcgccccgccggagcgcaaatactcggtgtggatcggcggctccatcctggcctcgctgtccaccttccagcagatgtggatcaccaagcaggagtacgacgaggccggcccttccatcgtccaccgcaaatgcttctagacacactccacctccagcacgcgacttctcaggacgacgaatcttctcaatgggggggcggctgagctccagccaccccgcagtcactttctttgtaacaacttccgttgctgccatcgtaaacttgacacagtgtttataacggtgtacatacattaacttattacctcattttgttatttttcgaaacaaagccctgtggaagaaaatggaaaacttgaagaagcattaaagtcattctgttaagctg

SEQ ID NO: 58 - DNA, 414 bp, Homo sapiens
ggtaatgtcgttttcatagttaaaatctgacattgtttatcaaagctagtcagttaagtggacacctgcaactcaaatcccataaacattttagaaacgccaaccacccctcctgaaaggtttgaggaatgaaatttggcagaagctcagctctgtgaaatagctcccgttttttttcttgggaccctacttagttccgtgggctcccattggcagtgattaatttctgccaatcagaacccatccctaacacatcagatgatagtggctttgacctagggaagaagaggttgagcgaagaacccccaccaggtatggtttgagagtccttagttggttttcttgggcgttaggtagtaagaatccaccaggaaccccagccaaaaccttctcaagtgtcacttgggcagattt

SEQ ID NO: 59 - DNA, 471 bp, Homo sapiens
  misc_feature (1)..(471): n is g, c, a or t
agaaaaagtatttatttctgctccgttcatacatcttattgttcaggaaacagttttacatacatatctgaaataatctaccatcacacactctagttaaaggcaaagcaccataggtaaagctgatcaactgtccagagttctcagcttacggaatcttgcttctggattttatgttaatttctgaaaatcagaaatgtcatctccaaaaaatgttaagagggttgtaaaaaataatcactttatttgatattatagttgtagatatggaatatattttaatgaaaaactaaaaagaaaatgccactcaacatcattggtatagcaataggccagcaggaaaaaaaattctgtgataaacttgtctctttaataccaagaagaaattctagtccaagcttcaatacgcttcctgttttttcactagatatttcntttactgctgctcttcattcttttccacatttcatg

SEQ ID NO: 60 - DNA, 556 bp, Homo sapiens
  misc_feature (1)..(556): n is g, c, a or t
ttttccgggagcgcgtggggcttgaggcgagaacgcctctgctgccaccaacatggagactttgtaccgtgtcccgttcttagtgctcgaatgtcccaacctgaagctgaagaagccgccctggttgcacatgccgtcgncatgactgtgtatgctctggtggtggtgtcttacttcctcatcaccggagaataatttatgatgttattgttgaacctccaagtgtcggttctatgactgatgaacatgggcatcagaggccagtagctttcttggcctacagagtaaatggacaatatattatggaaggacttgcatccagcttcctatttacaatgggaggtttaggtttcataatcctggaccgatcgaatgcaccaaatatcccaaaactcaataagattccttcttctgttcattggattcgtctgtgtcctattgagttttttcatggctagagtattcatgagaatgaaactgccgggctatctgatggngttagagtgcctttgagaagaaatcagtggntactggantttgctcctggtcaatgaan

SEQ ID NO: 61 - DNA, 502 bp, Homo sapiens
tagggggacaggtgtgtttattacccacagtcagccacacagcatgaatcaccacccctgccttcatcagactttacaaagggctgaggggcctctgggcagactccatggcccagccccaccacctgcccaacaccaggaccccaggcctcgtcatcctgaccccagccctgctcctgacctctgacctcaaggaaaagacagaccccaccaagggcctgtcgcactgggccttcatgccagggcaccagggctcgcgggaggacaactgaggtgtccctgagtgtcgctcagcccccccacaaccccgcccccaggaggccagggcacttagatgaggaacttgaggcacagtggtgaggaggcggaaaggcccagaggcggagtggccaatgggtcggagggcctcattcccatgtgatctgatctgggtggcagaactgagcccattggggttccccgggagcccccgcggggccgcccagtctctgagacggggttg

SEQ ID NO: 62 - DNA, 478 bp, Homo sapiens
  misc_feature (1)..(478): n is g, c, a or t
gataataagcactgaacaattttattaagttctttgccaaaatgcaaacatatgaaatgaggttgtgtacaatagaccaaaggctacctagagaccaacagtcatataaaaataatttaaggcaagctttattgatttattttaaataaggtaagtgaaatatgggctcagaattaaataagattttcaagaaagttcttgtagctgtaaaataggagaatatgaatgtcaaaattttgactgtttctgtgccaaacagaaagtttcacaaatgctttccaaactgcaataaaaagaactttaataataccattaagtctacaaagttactgtcaagttgacagtattcaaatactacaatattttctaaatgtaaattttgtaacatcctgaatactttctaagcccncttttccggtccattacnaaaataaaattccccngaaatttcnggctancattaatcnttagnggatcc

SEQ ID NO: 63 - DNA, 471 bp, Homo sapiens
  misc_feature (1)..(471): n is g, c, a or t
naattttatgtcgctatagtataaaaacattaataagatagcacattgacttttaaagggaaaagtaaatataacttagcatgtaaactcatttcggctaccatttgctccaaattccctagaacagtggtttttaccactgtactccaaccccgtttttaagcaatggaactctttcttcaaacaaaagcttatgcagaacatctctgtgaaacgctgctgagtgagaactgctttcattgaagctggaagccatcataccttactgccttgaaacccctaggactcagctaagtatttgcctaaccctgaccaggggaatgccttgggttctgtcaattgctgacatctggagaacacagaataatccatcatttttaattttcaaggtattgggtacatttattgggtttcaaggcatnggcttttnctttggcaccgttangtatttntttaacttantattacctt

SEQ ID NO: 64 - DNA, 391 bp, Homo sapiens
  misc_feature (1)..(391): n is g, c, a or t
gaattttanttttttactttattatttacattgcacttatgcttgaaattatctcttttacatatttacttcttaccttattttactacttatttgtttattcacttattttttagtgatcttgccagttttgtttgtcatcattgtattaacagcctggnttatagaagacataaagtaattattaagttaataaatacattaactgttgcaaaagaaaagccattgctttgatacctataaaatgtaccaatatcttgaaattaaaaatgatgggattattctgtgttctcaggatgtcaggcaattgacaggaaccnagggcattccccggggcnggggttaggggcaaatacttaggcngaggcccngggggnttccagggcngtaa

SEQ ID NO: 65 - DNA, 417 bp, Homo sapiens
  misc_feature (1)..(417): n is g, c, a or t
tttacaaccagatatatattttattgcattttgcctgtttataacctatattgcaaaacaatagattcatttttgccttcccaaatatanaactattttaatattgaatatgctttttcaaactctacagcccccttctctccctcattccttatgagattttgatacacttcttaatgggcaagagatctttttcttgagaatcactgaaccaaaacccaatttctgaattattattcaggataaagtgcaataaccatgactgaagaaacagtattcaattaaaatacagaaattgtcaactgaaaaatagtgcatgacagaatatccaacactgtattgaatattttctgattattaaaccaaattacttaaaccttatacttgaaaactaatgcacattggtttttaaaatgg

SEQ ID NO: 66 - DNA, 392 bp, Homo sapiens
  misc_feature (1)..(392): n is g, c, a or t
caggctggtcttccggcttctggatatcgcnccccttggcctcccaaagtgctgggattacagggatgacccaccgtgcctggctgggccatttatattatcattctactttcagagtatacagaagcttcatcccatcatttgganaaataaaggcatctgaagnacaatattacttatagaantagtttatattcctattanatcttaatcttgtggcatcagggaaatatttgttacatagtaggcaatttttatccagtactttatagattcaactctaagttgcaagcgaagtcaaaactggatgaaaatttnatttagaaaaatctaaaaattctgggtttttaaatatggaggaattcagtggggaaaatnaggggtattaattt

SEQ ID NO: 67 - DNA, 256 bp, Homo sapiens
tgactggctagaaatttttattatttgcgaggcagtaagtgctcttgagagcaggcacagtgctgggaacactaggccccttcgggacaaaccagggccttaaggaaaggggcttcggctttggcttgagggaaggcacataactgggacaggccctggcggcgagtattcagaagccaagtgggttgctggtgaccacaccaccccgctccaccaaggccttggagatgcttttgaagttgcggtagagctcttg

SEQ ID NO: 68 - DNA, 160 bp, Homo sapiens
tggattccgacacttctgactcgcatgttccttccggtgtcactgaggtggtcgtgaagctcgttgactctgatcccatcactgtgacggtccctgtagatgtctccaggaataaccctaaatttatggagaccgctggcggaggaaatgcgtcttgcag

SEQ ID NO: 69 - DNA, 276 bp, Homo sapiens
  misc_feature (1)..(276): n is g, c, a or t
gttcctgcagntgaaccatgtgcagggccccagggagaacatgctgagtcgctttgcacaggtcttgccagatggacctacgtcaaactcggtacagcacagagcaactaccttcccatngtggtggtgcgggtngagctgctgtcaggggagatcctccctatactgcagaaggcctgtgtcatcgccatgncttactcggtnatccgncggcaatcccggctncggcccagtgacccagaggcaaaggtcctgggattaccagagacaacagca

SEQ ID NO: 70 - DNA, 297 bp, Homo sapiens
  misc_feature (1)..(297): n is g, c, a or t
tctagtgatgnngttttaatgttgcatatatgccatagtaccattatcacatgatggtnctggttgcttcttgaatactgttggttatttcatagcttggatctccaactttgtaaaagtngtcttatatattcctcataggcagggttctcctgagtattggttggtgacttctgagcccactggaacaggcgttcgtagacgtttccatcataacagccaagtgctgaatttaaacactgatcngtgaagtcaaaagcatcagttaacanggatggcatccttccggttcaggcg

SEQ ID NO: 71 - DNA, 549 bp, Homo sapiens
ttttttattttagatatttttatttctccaaatttgttatttatcaggagtgactgaaataaaaaatacaattgagtcccatcatcatcatcatggaaatggctttaagagaaaactggtcagatgaatattattgcttcccattttcaaccagtaaatagttgccactgagaaactgacagccaggagtctgtcaagaatgctcaagatatgttatataatacaacatgcctgttcacagggggaaaaatcctaggaaataacttatgtgtacttcttgatttcatcatacaagacaagcacaaaagcaccacccatgcctctgagaacattggaccatgcacccttgaaaaaagctttgcctcctctcatcacgagcaatcttccgccagcagtcaagcgtgcctgtgtacatgatgtcagttcctttgcgccctgactggcatcatcatgcggcggcgaacggtgtctaatggataggaagtcacccggcaacagcagtgacagtctgtgcgatcatcagctgatgacgatgtgagtgttcttggg

SEQ ID NO: 72 - DNA, 295 bp, Homo sapiens
  misc_feature (1)..(295): n is g, c, a or t
tcccntcctgcagcantctcgctcctcttgcaacagtacagagtgcgctgtntcgttcnccaannacttcctggcagngtgagtngccgcaacatctccaagactncgntaccccgatcgagcgngtcagagctcgtctcagnntcacagtgccancaagcanatcactcgaggtgtacgatacgaangcattatanagctcgtgntccgtattccagaggacaaagagttctntcttctgcgcgggtaacctngcagtntcacgaatacttcccaccgangctcttaacttcgc

SEQ ID NO: 73 - DNA, 365 bp, Homo sapiens
cttttgttttaaataaatacttagaacacgacttggctcctacaagcatctggactctaggtctcagtactggagtgtctcacccatgggccccacgcagggacgccacggttccctcccaccccgtgatcaagacacggaatcggctgccgatggttggatcgcaatgcgccccttttctagagccttccccggccatctacaggcaggatgcggctgggaaaaagacaactggaatttctcgaaggttgatggtccgcacggttgaggattctacgtggttctcttggttcccctggtgtgtgtgtgtgtgtggaggaggccgcggcccttagatcaccttcttgagctcgtcgtacaggacc

SEQ ID NO: 74 - DNA, 380 bp, Homo sapiens
gcatggggggcgccttcgtgctggacctgtacgacgagctcaagaaggtgatctaagcggccgcggcatcatccacacacacacacacaccaggggaaccaagagaaccacgtagaatcctcaaccgtgcggaccatcaaactacgggaaattccagatgtcttttacacagcagcatcatgactgtagaaggacggggaaggctctagaagaggggatcattagctcccaccatcggcagacgcttccgtgtctaggacacgtggtggcactaaaccgtggcgtgcctgcgtggggaccaagggaggaactctccagtaactgaggcctcgagtacagatgcatgttagagcccaagtagtgtcctaagtatctattta

SEQ ID NO: 75 - DNA, 360 bp, Homo sapiens
cccaacatagaacatactcgccagtactcggctgtgcaaaacaggggctagcgctgaagtacaaatgggaaaacgtgattcttttgttttagataaatacttagaacacgacttggctcctacaagcatctggactctaggtctcagtactggagtgtctcacccatgggccccacgcagggacgccacggttccctcccaccccgtgatcaagacacggaatcggctgccgatggttggatcgcaatgcgccccttttctagagccttccccggccatctacaggcaggatgcggctgggaaaaagacaactggaatttctcgaaggttgatggtccgcacggttgaggattctacgtg

SEQ ID NO: 76 - DNA, 405 bp, Homo sapiens
gtccttagaaattcctttagtgctcagctgtccatgaaaacaggataagcggcttcctccgtctgtgctcagcagggcagggtggaggcgctgcgctcaggccaggaggacctctaatcaggacggggtggggcggggctctgagctggggaagcggctccagcgttgctactttagggcgtccaggtgggtgcagacctgggagaagacactgtccacggagccctcagcgttgaccttgcgcgcaatgccacgtttctcatagaaggcgatgacgggttctgtggccttgtaataggtctccagccgctttttgatggtctcctcattgtcgtccacacgcccgctggtctctccacgtttcaagagccgctgggtcatggtctcagggcctgcgtccacata

SEQ ID NO: 77 - DNA, 784 bp, Homo sapiens
  misc_feature (1)..(784): n is g, c, a or t
acatcaagcaagtgcttttttaatcaatacatcaaatgatatttttgctagcctgaggaagcttctctttgcctgtcctatcattcccacccattgcctcacagggatggaaagaaattccttcttggacccaacattagataaacataaccaagtctttacatgtggctttggagaaggctgctaggatgcttgcgaacacgacatcgggggtctgggatgcatcgatggcggagtggatcccccgtttcctgtagtactctatgagtggggtggtttgagtgtggtaggcttgcaggcggattttcaaggccttttcattatcatctgatcgacggatcaagggttccccggtgatgtcatctttcatgggctcttttggagggttgaactcctcgtggtaggaacggccactcttggggtgaatcagccttcctgtgattcttcggatcagcagagagtctgggatgctgaattcaatcacagaatcaagcttctctttcctcttctncatgaggtcatcgagcatttctgcctgcctcacagtccgagggaagccatccagaagaaaaccatttttgcacaaaggggtctccaaattcttctcaatgagctccactaccatttcatcactcaccagtttcccagcatccatagttggcctcagctnttttcctagctctggagcaggagccaccatgggcctcagcatggtcccagtacctaaaagggcagaaacagagttttcaaccaaatctgggtgctgggtcccttttacgggccc

SEQ ID NO: 78 - DNA, 359 bp, Homo sapiens
  misc_feature (1)..(359): n is g, c, a or t
ncggggactgcgcggcggtgcagagccgggcgtgggcgagaacgaacgggctncctgcggctgagagcgtcgagtgtcaccatgggtatcacgcttggagcttcctaaaggacttcctggncngggcntcgcnctgcccgtntccaagancccggtcggccccaatcgagaggncaaanctgntgntgaaggtgcnagannccnagnaacangtnaantcttangaagnnntacaaaggggtnnattanttttttggtannattccnnangancaaggntttcctttcntnttgnagggtnancntggcaangtnattccttaatttcccaaccaangttttaantttggctttaangg

SEQ ID NO: 79 - DNA, 394 bp, Homo sapiens
ttttttttttgcattaagtggtctttattgatgtttcacattcagttattatcaattcttcagttaattgtacaagtatgataaattattttctatttgctgtgggaatttaaatgtaaaataaatacaaaatacatgtgtggtttaatgaacactcaatgaagcatctcttctgaggtattcctttcagtctggttttatcccaggatctttttacttcccctaggaatagtctattaaaccacacaatggatctgtgaacttgtagatcaagttcactgtaaatctgtgaacttgtgttttaattacattagacatattttttgatctcatcatacaacaccaatacaaaaggcaccgcccatgcctctcaggcacattgggaccgggcacc

SEQ ID NO: 80 - DNA, 448 bp, Homo sapiens
  misc_feature (1)..(448): n is g, c, a or t
aaatcgcttttacaccctgatcccccacgactttgggatgaagaagcctccgctcctgaacaatgcagacagtgtgcaggccaaggtggaaatgcttgacaacctgctggacatcgaggtggcctacagtctgctcaggggagggtctgatgatagcagcaaggatcccatcgatgtcaactatgagaagctcaaaactgacattaaggtggttgacagagattctgaagaagccgagatcatcaggaagtatgttaagaacactncatgcaaccacacacaatgcgtatgacttggaagtcatcgatatctttaagatagagcgtgaaggcgaatgcaggncgttnacaagcccttttaaggcagctttcataaccgaaganttgctgtngcacgggttccngggccaccaacttttngctggggatccngttccccgggtttttgg

SEQ ID NO: 81 - DNA, 422 bp, Homo sapiens
  misc_feature (1)..(422): n is g, c, a or t
ttttttttttttgagaaggcatctgcatttttaatcgagtattactattagcccttgggtaagtatatttgtggtagagttttaatttggaagacaaaagtgcccataagaaagtcaagaatttcaaatgcaacttttaatactacatatttcaagagctcccatgttcagtattcctgggagaagggaaagctctttttgtttctaagtatgagaaattgttagcgttccttcctttgggtcttccccacacccctcaccacaagagggcaaacaaaaaaaactaaaaagggggacaatangtgccaggntaaaaaaaggaaaatcctaaaataggtatggaaatttagttttttatttttttaacctaaaaattaaaatngctttaancatcttttcccnaaaatccaaaanctaaaagg

SEQ ID NO: 82 - DNA, 435 bp, Homo sapiens
  misc_feature (1)..(435): n is g, c, a or t
gctgagtaactgtatttaatgaaaattgttcatatttcaggttgctcttctgttgttagaaaaagaagtattagataagaatgatatggttgaacttttgggccccagaccatttgcggaaaaatctacctatgaagaatttgtggaaggcactggcagcttggatgaggacacctcacttccagaaggccttaaggactggaacaaggagcgggaaaaggagaaagaggagcccccgggtgagaaagttgccaactagaggcccagaggagggccatctcagtctctccactggtggttttcagctggtgcattatttcagctgtggcttttcagaagaatgggnaatgctgcgctgattttagccagccactgggccagctgaaatgatgggggaaaggagtccttagtcctttcagcctcagaggtcacaga

SEQ ID NO: 83 - DNA, 414 bp, Homo sapiens
  misc_feature (1)..(414): n is g, c, a or t
ccacccactgtgacctctgaggctgaaaggactaaggactcctttccccatcatttcagctgggccagtggtggctaaaatcagcgcagattcccattcttctgaaagccacagctgaaataatgcaccagctgaaaccacagtggagagactgagatggcctccctctgggcctctagttggcaactttctcacccgggggctcctctttctccttttcccgctccttgttccagtccttaaggccttctggaagtgaggtgtcctcatccaagctgccagtgccttccacaaattcttcataggtaagatttttccgcaaatggtctgggggccaaaaagttcaaccatatcattcctaaccaatacttcnttttcctaacnacagaagagcaacctggnaatatgaacaat

SEQ ID NO: 84 - DNA, 603 bp, Homo sapiens
tttttttttttttttttttttttttttagaagaatcagaatttatttcactatgtgaacattaagaatttacctacatagttgaaaatattcacaaaggacttgatcattcacactcatacacagagaaagtctgctgaataaaaaaatgctcctttacccattcgacctcctctcaggggctgcagtgggtttgccaattccactgtggggcttcagtcttcatgaatgttgaatagtttggctacttcattgagatcttcatgctgctcaccgtccttaatgatcttccttgctattggcattcggttaaagatgttccatagcacaatccccacgaccactttgtccctgaggtagaagatgacacctttgccgtagtcctccccctggacgggagcctgtggaactgccggggtgctgggaggaatagtaatttctgaggcctcggactctgtctcactctctgatcggataccagttcctgactgctctgtggcagatttggggttgtcttgtgcagttgcttttgcaaaaacaccaactgtgggcaaactactgtccacaagaccaatagcttcatagccaacatcggggcccaaat

SEQ ID NO: 85 - DNA, 575 bp, Homo sapiens
gctgtggaaacacagtggttgtcaaaccagcagagcaaactcctctcactgctctccacgtggcatctttaataaaagaggcagggtttcctcctggagtagtgaatattgttcctggttatgggcctacagcaggggcagccatttcttctcacatggatatagacaaagtagccttcacaggatcaacagaggttggcaagttgatcaaagaagctgccgggaaaagcaatctgaagagggtgaccctggagcttggaggaaagagcccttgcattgtgttagctgatgccgacttggacaatgctgttgaatttgcacaccatggggtattctaccaccagggccagtgttgtatagccgcatccaggatttttgtggaagaatcaatttatgatgagtttgttcgaggagtgttgagcgggctaagaagtatatccttggaaatccctctgacccaggagtcactcagggcctcagattgacaaggaacatatgataaaatacttgactcattgagagtgggaagaaagaaggggccaactgggatgtggagaagcccgtggggaataaag

SEQ ID NO: 86 - DNA, 426 bp, Homo sapiens
  misc_feature (1)..(426): n is g, c, a or t
tttttttttttttttaagtaacaggcattttattgggtggcatctgagcaaatcccattgccacctcacagtgtagaaccagtagaactaagaatactccagacctgtgcccccacccagccacctgccccgcccctcatgggaaatgacacatatcctggaaggacacagaacccacacccagcccagctggcaccagcacccacccccatccatgggccagtggcacttggggaatggccacaccagactccgggtggggtcccatgcaggcatcctggaggaagacccaacantttcacagtcccctaagaaccatccttgaaagtcatgntttacagatctctgaccactcagaatccaagcaggaggcatctntgggaggaatcgtggtcacagattngctgcgtcaaaaaaagaatgggc

SEQ ID NO: 87 - DNA, 351 bp, Homo sapiens
  misc_feature (1)..(351): n is g, c, a or t
angttctaggggaaacctnatcaaacccttagncttctctagttactgttgatttctnctacagggtagggatcactacagtccctttaattaaaagaaacggatttaaaacacctgattctaaggacggtggtacactcttgagaaaagagttaaagtcttttatttgtatgaaaggcaattactcagccctaaaagctcaacagacaattnagggcttaaattatacaatgttttcccatcttctccagatacaacctcaattacatagttttttagcttnagatatnaattgaattcagctgattgttgataaaatgccctttggttaganaaggnggagganagaga

SEQ ID NO: 88 - DNA, 392 bp, Homo sapiens
  misc_feature (1)..(392): n is g, c, a or t
agagggccaacaacaccaggtatggcctggctgcggctgtgttcacccgggatctggacaaggccatgtacttcacccaggcactccaggccgggaccgtgtgggtaaacacctacaacatcgtcacctgccacacgccatttggagggtttaaggaatctggaaacgggagggagctgggtgaggatgggcttaaggcctacacagaggtaaagacggtcaccatcaaggttcctcagaagaacttcgtaagagcagctgttcagggaggcccagtcacagttccagcaatttccacaaccaccttgaccantgctttgccaagttttttttaaaggccaagaacanccttttttttgtttcccaaattaanttttnggaggaaccccaca

SEQ ID NO: 89 - DNA, 278 bp, Homo sapiens
  misc_feature (1)..(278): n is g, c, a or t
ntgaaacattttattaatccactcatcagttgatggacatttgggatgtttgggcttactttacaggtgtaatcatgtaagcatattctttgccngnnccntcccaccgntnaaggaatagcagtagcaagncnangggcaagcccntaaaacagccagcanctggcacacagacaaggaaaagcacctctggtttttaggttaagccaatgaagagtgggggccgagntttagtatccacctngttcaaaacccctaacactttccaagcttgtgtt

SEQ ID NO: 90 - DNA, 477 bp, Homo sapiens
  misc_feature (1)..(477): n is g, c, a or t
ttttttttgcccattaaaaaattttattgatacataatatttatgcatgtgatattttgttacatacacagaatgttaaatgatcaagtcagagtagttagggtaaaaactaaaaatagaactaccataccatccagcaattcttttgcctatttttaaattacttgccttttattgagttgtaagagctctttatgtatctggttacaagacttttatcaaatatatgatttacaaatattttatcctattctgtgggtttcctttcaatttcttgatagtaacttttaaagcttttgggttttcatgaaaactttggtgaaagttcgctattttttctttggtcccacttagatacagngtctatattcattctgacaagaggaaggtgatagcagaaaaggacaaatgaaaaaatgacaacttcacagttcatattagtaatgaaattatttagaaaattgcctttcactatat

SEQ ID NO: 91 - DNA, 416 bp, Homo sapiens
atagtccatgatatatttgattactagtataaccacagttgaaaacttaaaaaaaaaattgacatttttttgtaatggtactaatggatttataaaaggtttctgtttccaaagatgttattggggtccacatattccttgacagacttcagcatcccaaagccgacatcagagatactttcctttagccattgcttccgtaacttgcccactccatggtgatgtgacaggctccctccattagcaaggatttcttctctagcagctgcctcagtttgttcaaatacggtcagtgggtcactaattcccctgtagttaaaggcaaaatagaagtagatacaagcacctgcatcgtaagtctgcgtcaccctgcatgtagaaaaaggagcaaactgaacacccttctctttgcattc

SEQ ID NO: 92 - DNA, 508 bp, Homo sapiens
ttttttttttttttttttttttttttttttcacctctgatacttttaagtgaaaacatgaattaggcaaactaatcaatttgacaactgttgggatccgggctttctcactgtagtggaaatggcttctttacttgaagtctgctaagatgtcactgaaaatattgaggaacaggtgagcgtggtgatccctgaagaccagcgtgggacggaaacgaatggatttgtcaccacagccacccaacaccacacctttgtttctggcaattaaaatgagcttattccgtatggaatcatcgggagtatcgaaggagcaaaaggtgcctcgtcctctcaccctgctgatgaactgggggtaccgggcctggaggtccagcagtcctgtgagcagggccttcccggcatgggctgcattatttagcaggtcctccccccgatgatgtttatgacctcagccagcaacagggttttggacgggtccccagccaggtggtgaagattcggagggg

SEQ ID NO: 93 - DNA, 437 bp, Homo sapiens
atttccaggactatgtttttactatagattaaaatttaatataacttaattcacatataaagacaactctgaagaccatctggatatgataatggcctggggttaagtgaaataattgaggtcatgctcaggcctgagcagataccaacttgctcaagcctgagaaataggacttctctctttcactcatcacttcaaaatgcagtggcctcctgcagaagttgcactcagctgaggaatgaggcttcagttccagccccacttgcttccatgtgactagcagattctcaaggaagtagttcaacatctggggtgtgtggtgaagggtagggggcaatccgtaggaggctcttctccccgggggcaccgtaagggaaattgatttgctttcaccgagatggtaatgactgctacattagtttcttcacagaattctg

SEQ ID NO: 94 - DNA, 506 bp, Homo sapiens
atttctggaacacttggcaaacctttggttgtgttggagggtacatcgccagcacgagttctctgattgacaccgtacggtcctatgctgctggcttcatcttcaccacctctctgccacccatgctgctggctggagccctggagtctgtgcggatcctgaagagcgctgagggacgggtgcttcgccgccagcaccagcgcaacgtcaaactcatgagacagatgctaatggatgccggcctccctgttgtccactgccccagccacatcatccctgtgcgggttgcagatgctgctaaaaacacagaagtctgtgatgaactaatgagcagacataacatctacgtgcaagcaatcaattacgcttacgttgccccggggagaagagctctacggattgccccaaccctcagcaaaaaccccagatgatgaaccactttcctgagaatctgctagtcacttggaagcaagtgggggttgaagtggagcctcatttcctcggct

SEQ ID NO: 95 - DNA, 501 bp, Homo sapiens
tttttttttgtggtttgtgctttatttttaggctcaattcagctagaggcacacaacaaagcagaagacaggagtaggcctggacccaagtgaagcgcaggtggggtgtgaatcctaggcagctggcttctcaggcataggtggtgacatactggggccccatgttcccgaagtaggaacgttcccactcactcatgagctcaaagtgtacaggacggcgacagaaattgcaggcagccacagacacatcctggaggggcagccccaccgcagtccaagccagcagcagcttctccacaaaatcttccatcatctgagggctgtggtggggggagggtgccaagcgcaggagctcttcaccccgggggacagttgggtagttgatggcctgcacatagatgccatgcttggagagcaggagatcacagagcttgctgttgagtgctgcattgcccacccggatgggaatgatgtggctggggcaggggatgacaggaaggc

SEQ ID NO: 96 - DNA, 505 bp, Homo sapiens
ctaccctaagatacccaaaattgtggcctttgagactgtccactccatggatggtgccatctgtcccctcgaggagttgtgtgatgtgtcccaccagtatggggccctgaccttcgtggatgaggtccatgctgtaggactgtatgggtcccggggcgctgggattggggagcgtgatggaattatgcataagattgacatcatctctggaactcttggcaaggcctttgcgtgtgtgggcggctacattgccagcagccgtgacttggtggacatggtgcgctcctatgctgcaggcttcatctttaccacttctctgccccccatggtgctctctggagctctagaatctgtgcggctgctcacctggagaggagggccaagccctgaggcgagcccaccagcgcaatgtcaagcacatgcgccagtagctcatggacaggggccttcctgtcatcccctgccccagccacatcatccccatccggttgggcaatgcagcact

SEQ ID NO: 97 - DNA, 445 bp, Homo sapiens
ggcaagtaagaaggaagtttaatttttttttcaggattcagtggagtccattaatgcataccaggggcaaagatcagcccagggtaaggcaagtctgggaggaagcccaccctgccctacagcagccctggaactcagaataggtggtgagtctgccatggtttgctactgggcagcacactagaccaacttgggaatgtggaagagtgagtctatgttccctcagccatccccaagtttacacacaggcatagcagccctactgtgagtcagcaatcattcctgacttgcagtaaggacaatttgcatttacggaaagcaaactggagggggtagcctaagtccgcactgcccatgttattaccctttgcaatgtgaaaaaccatggtgaggtaggttgggcaggttttatcctctccacaaaggtgagcctttgctccacagc

SEQ ID NO: 98 - DNA, 474 bp, Homo sapiens
  misc_feature (1)..(474): n is g, c, a or t
ggtacagtcgtccagggacaatgctgctggtagaggtgcggcggaacagcacgattgnctgtagtcagcaagatgccctttgtgcccacaaactgctataccctcaagtgaagctggctcagggtggggctgtcccttccaggagttttgcccctacaaggggttagtcaagaagctgaggcagaactcactgggggtgggcagttaaggtggaggctgattctaattgncnngnttnaggggccacaccacctattccccccacctaactcatgccattccagcttccttcaggaccctgcttctgaagtgacggaccagctcacacaatgtcttgtttcagtccatgattccactggacctactcttgcctgctggagggttaatgagaagctttggttctggccatctctaccattctggccaggttgctggctgtggagcaaaggctcacctttgtggagaggataaacc

SEQ ID NO: 99 - DNA, 772 bp, Homo sapiens
ggatcgcaatggccccttttctagagccttccccggccatctacaggcaggatgcggctgggaaaaagacaactggaatttctcgaaggttgatggtccgcacggttgaggattctacgtggttctcttggttcccctggtgtgtgtgtgtgtgtggaggaggccgcggcacttagatcaccttcttgagctcgtcgtacaggaccagcacgaaggcgccccccatgccccgcagtacgttggaccacgcacccttgaagaaggccttgcccccctcatctctgaagatcttcctccaacagtcgacggtgcccgtgtacatgatgtcagctcctttgcgcccggactgcatcatcatgcgccgccgcaccgtgtcgaaggggtaggacaccacgccggccacgcgtcacggtctgcgcgatcatccagctcaccacgatgtgcgtgttcttggggtcggggagcatgcccttggccgtatcgtacacgccgaagtaggccgcacggtagatgatgatgccctgcacggagacactgaagccctggtacaggccccggatgccgtcggacttggtgatcttcaccaggcagtctcccaggcctcggaactcgcgctctgtgcctgactttcccacgtccgctgccagggcggttctggcgaaatccagcgggtacacgaagcagatggaggtcgcgcggtcgtactcgccgaggcaaggtttgccggcaaagtaacttcagaaaatgcttggtgtttttccacgccccccag

SEQ ID NO: 100 - DNA, 219 bp, Homo sapiens
  misc_feature (1)..(219): n is g, c, a or t
gcattttcaaagataaattggaattgctgttggtgaaataacaaccaaaatactgaatctgatgtacatacaggtttctacaggaagagatggtataatttacaatttggagatttaataaccagggctacccagaaaaagtgacttgataacatggtaccaataagtaagggatgctctctcggtttgcttttgccactttcaanattttaactnctc

SEQ ID NO: 101 - DNA, 492 bp, Homo sapiens
  misc_feature (1)..(492): n is g, c, a or t
ttttttttttacaaaaggaaatttatttcaaaagcataaggggacatttacatttaaacaagatgataaacaggtgtcttgcaaaagaaaaaaatccatggcattaagtttttcattcaaattcggaagcaaaaataacctaagttgtgcactattgccttaggaaagggaaggggaagggtgagggataagggaacagtcaactcagtatcaaacttgagaaagtaaagtcacttctgctcagttctgagtttacaaatatgcttataaagacaaaaagtggtaaaattatatttaatgttcaaatttatttagctgtagtctctataatttctgtacttgaaatggctttgggccactggctggatctatctctgaggtccagattagctggtcagttttcaaatggcaattttatattccccttgttcagattccccagggaagtttagggttcagctcatgggcctttgggnatggtttagagattat

SEQ ID NO: 102 - DNA, 442 bp, Homo sapiens
  misc_feature (1)..(442): n is g, c, a or t
aaattttttctcacagaattctttataaaaacaccatgtccctaaaatgtgattcaacatatatgcacaccttcgatgtataggacactgatcaaaaaagacagagaaatgtgtccctgggggttttgtttttgttctgtttgtttttaaaggcagggtctcagtatgctgcccagggatgggattcaaactcctgggggctcaagtaattctcttgcctcagcctggggggactacagggcaccatacccaccacacctggggcttcatgttcccgggtattaggtacaatgcccaaaatattttaaaattcttaaagggntaacctcaaatatccttaaggttttactttcactttaccaatttccaataatgctggaaattttngaatgaatattgtgtttntagggggctacccctttttcggtcaaagggacaaagg

SEQ ID NO: 103 - DNA, 363 bp, Homo sapiens
  misc_feature (1)..(363): n is g, c, a or t
agatctaccagtggaagaacaattgcggagactacaagaagaaagaacatgtaaagtgtgtatggacaaagaagtgtccatagtgtttattccttgtggtcatctagtagtatgcaaagattgtgctgcttctttaagaaagtgtcctatttgtaggagtacaatcaagggtacagttcgtacatttctttcatgangaagaaccaaaacatcgtctaaactttagaattaatttattaaatgtattattaactttaactnttatcctaatttgggttccttaaaatttttatttatttacaactcaaaaaacattgttttggggtaacatatttatatatgngatcctaaacccatatggga

SEQ ID NO: 104 - DNA, 784 bp, Homo sapiens
  misc_feature (1)..(784): n is g, c, a or t
ccaccattatgtaacaatttattcctttttcacacaaaacaaattatgtgattggggagattaactctaatctccacatttatatacagaaagctccatttgttaagcctatctgaaaagaataaaaaatccagatgattaattcacttacacttagaaattaaatcagtatactatgaatacacattgtgttcagttatagtatgatgcttcttattcttagtctatggtttcaattaaataacagtaaaaaaaatggataatacagctaataccctgaaaaatcaagaaattcaaagattatattgccaactaaaacactgccatgtacattttttttcctacttggtagcaaatgctaatggaattcaatcctgattacttaaagtcagttcacatcacacattcaatcagggtaataagaacaacataacatgcctactatagagttagattaagacataaaaattttttgcttgaaagtaatgactgtgtagcacatgggacacttgtcaactgcttcagcacattgtttacaagtgactagatgtccacaaggaacanaaacgatagcaatatttctatccatacagantttgcaaagcttctcctcttgcangcgccttagctgctctcagtactaatctncttctgtaatgagtctgacttgactcatcttgcatactgtctttctgagcatttcactagatctgcaccagaaacctcaagtgatttatagtgctcccagatatctgaatttttcctccattatnttcttaatgtc

SEQ ID NO: 105 - DNA, 474 bp, Homo sapiens
aattttaatacatttatttttgtgtgattcttaataaaacactttcaaaacattctgtacatttcaagccactcagaaccgcattacatttctacaaatgtgatttgttgggatgaggtgccaagatgtctctgtacaaagatgtacaatatgtacaatcactgtaagtgcaagctgtgcaaagcagagtctagaacactaattcatgccaaggcttacaaaaacatttcaacacataagactaaagcttgaaacagcgttgtggttttttccctgggcaaatgattattttataaacaagtatatgtatatgtcatacagaaagaagagtttgactcctcagctcagtcagtaccatgcagctgactggatacattacagggctgctctcctaaggctctttcttcaaggcgacattttgccacactccacagttgtctcatcactgagtggctgccaatgctcctcgtgccg

SEQ ID NO: 106 - DNA, 769 bp, Homo sapiens
tgggtctacagtaattttattgtaacagagaaaccaggccgcaataagtctacatggttagagcagatggtggttctttccagtgggtgaagcctgaacccagctagcagcacgcaaagcctagaatatcctctttcctggtaccaccctgcgccgctggactcacagtgtgagatgagaggctgcacaccacattcaacaaagggaggaggtccaaccgggcagagacaacatcccaactggagaaacttgcactatcattcaagaggatgccgagataaagtacagtttcctactctccactattctttgctgaaaagggtgagggtacagcatcagcagaaaattatgttcttcattcttaaataaatctcgataggatggagttgatggtcaatcaagcagtagaatgggatgaaaatctgcaatagttaaaaaatctttgcgtgtaaggaaaagaacggcaatgacaagggagaaaagagagccttctctttttcttaaataagacaggaaactgcattatttcccttgctggagtggcagcagcctcattggttttcataaaacatcatttctgcagtgcggcctgttgataacgttgttccaagatgggaggacagacacgaagccgactactcatgaaagaactaggccttctctcaaagccctctacgtgggctgtttctcaacgagaacctgacactccagtttaagctttctgaaatattgaatggcctaattgacaggtttttggggcgaagacttt

SEQ ID NO: 107 - DNA, 455 bp, Homo sapiens
gcttttagaattatttattcaaaaacactttataataaattcaggtaacagtaaagtaatacattcaatagtactaaaatctatagaaaatagataatttcattaaggtgcaattaaaatacttgaaattgggacacatctctatatttcaaaccaatatactggctttctttttaaaagactattctagtctttacgatgtccaaagtttttcctctttgcttttatttgctttagaccatatttaaatttttagcattcctaagtgcatacattttaggcatatactataatgaccaagagtttgtgaacctactgattaggtaaacactttggggaggtatgacctgcacaaagtagggtgggaaagctattatctcccttaatctggacacaactgttcaagcagtctataatttattagcttctctgatagcttcaccatttgggggtcc

SEQ ID NO: 108 - DNA, 477 bp, Homo sapiens
  misc_feature (1)..(477): n is g, c, a or t
ctgaagtgggagcggccgcacttttttttgaccgtaagatnttcccctttcttgtaagttctgctatgtatttaaaagaatgttttctacattttatccagcatttctctgtgttctgttggaagggaagggcttaggtatctagtttgatacataggtagaagtggaacatttctctgtcccccagctgtcatcatataagataaacatcagataaaaagccacctgaaagtaaaactactgactcgtgtattagtgagtataatctcttctccatccttaggaaaatgttcatcccagctgcggagattaacaaatgggtgattgagctttctcctcgtatttggaccttgaaggttatataaatttttttcttatgaagagttggcatttctttttattgccaatggcaggcactcattcatatttgatctcctcaccttcccctcccctaaaaccaatctccagaactttttg

SEQ ID NO: 109 - DNA, 375 bp, Homo sapiens
attttaagttgtttattttaagataatttacaaatatcttgctgtcttcagtaattcaaataatggaggaacagtttcttcggacaaaggcagcagtaagctaaaaacaaaatcaactggctgaattttccttctttacctcttgtctgaggatggaacttgattttcattaatccagagctgcagcaccagagataatttcaatcaactcttttgtgatgacagcttggcgggtacggttgaatgtcaatgtcaatttgtcaatcatctcagaagcattcttgctggcattgtccatggctgtcatcctggcactctgctcactagtggtggactccttcagagagtagtagatgatgttggcccgattgtatt

SEQ ID NO: 110 - DNA, 515 bp, Homo sapiens
tcattcaattgtcactttattgcaagatggtagaattaattacaaatttaaactataacctgttaatctttagtcaggcagcaagtttttataaaggcaaactgcttattcagaagtgatcacggaacaactcaaaggcagagcaagaaggatgagaaacatctgactggccgatagagatttcgttctctcactatatgaaacaaacttttcatttttaggaagggtaaactataacttcagtagacaccaacacagaaagactttgtcaaatagactagtttccatttagtcagtcaactgtttctagctgtctcaattgggatagatacatttacataactggctgtgcttgagccttctttgccagcagctttaggtccgcaatgcacttggcaattgtctccttttcctgctgtgtggagatgctttgcaccacgtgcttctccacccaatttatcatgtgttcttgttcccttcgacgcatcatgttctgcacagatatatgatagtcc

SEQ ID NO: 111 - DNA, 512 bp, Homo sapiens
cactatcatatatctgtgcagaacatgatgcgtcgaaaggaacaagaacacatgataaattgggtggagaagcacgtggtgaaagcatctccacacagcaagaaaaggagacaattgccaagtgcattgcggacctaaagctgctggcaaagaaggctcaagcacagccagttatgtaaatgtatctatcccaattgagacagctagaaacagttgactgactaaatggaaactagtctatttgacaaagtctttctgtgttggtgtctactgaagttatagtttacccttcctaaaaatgaaaagtttgtttcatatagtgagagaacgaaatctctatcggccagtcagatgtttctcatccttcttgctctgcctttgagttgttccgtgatcacttctgaataagcagtttgcctttataaaaacttgctgcctgactaaagattaacaggttatagtttaaatttgtaattaattctaccatcttgcaataaagtgacaattgaatg

SEQ ID NO: 112 - DNA, 456 bp, Homo sapiens
  misc_feature (1)..(456): n is g, c, a or t
ccagggctctacggtatttaatggggcccagaatggtgtgtctcagctaatccaaagggagtttcagaccagtgcaatcagcagagacattgatactgctgccaaatttattggtgcaggtgctgcaacagtaggagtggctggttctggtgctggtattggaacagtctttggcagccttatcattggttatgccagggtaatcatttctatccctaaataagttaagagcatgcttgcagtagttgggaaacttaggctactgaaataataggctactttgcattaagtgcttactctgtgtcttgcattatatttaaaggggctttgtatggcattatcntcacttaattctcataacaccntttgggggtgttatggaggattaacctcnctggaagggnccaggaggacacagngggccacnttacttggccccgggggcntaggctagnt

SEQ ID NO: 113 - DNA, 379 bp, Homo sapiens
  misc_feature (1)..(379): n is g, c, a or t
tgaaatgactttggaaataacgtacattcccatgacaccaatactacagttttcggagtcacagtaagatacacagaattacatccgtaattaatatgaatgccaacatgtcaagcagtaatttgttacatggcaaacaaaatcaagaaagcaaccatcaaacaaaagagacccatagcttcagacaaggcaaatcccaggatagcatatgagaacagctgctcttcagcgaagggtttctaaaagagaccacatatgactgttactttgaaatattaatttcaacatgtttggtaaatgttaaaggatcaggttactagtgtggggatttttgttaaactggaaaagtctgctgggaggagtattttgccnaggattc

SEQ ID NO: 114 - DNA, 382 bp, Homo sapiens
  misc_feature (1)..(382): n is g, c, a or t
agagaaacgttgtgtttaatggtaaagcttaacacaccccagcaccaagaatggtgtggagttgcagtagcaacaggccggtgaccccccatggagcctcacatggcgaagaggatgaggaaggcgaccatcaaacagaaaagccccatggcctcagacagggcaaagccaagaatggcataggagaagagctgctgcttgagagacgggttccttggcatagccaattgatcaangctgccaaacacggttccaatgccagcccctgaaccagccacaccaactgtggctgccccagcaccaataaactttggctgctngtntcaattgtcccgggagacaacacttggtcttggaactcccgtctgggccacctnggagt

SEQ ID NO: 115 - DNA, 412 bp, Homo sapiens
  misc_feature (1)..(412): n is g, c, a or t
ctgggagactgaaaaaatgcagaccgccggggcattattcatttctccagctctgatccgctgttgtaccaggggtctaatcaggcctgtgtctgcctccttcttgaatagcccagtgaattcatctaaacagccttcctacagcaacttcccactccaggtggccagacgggagttccagaccagtgttgtctcccgggacattgacacagcagccaagtttattggtgctggggcagccacagttggtgtggctggttcaggggctggcattggaaccgtgtttggcagcttgatcattggctatgcaggaacccgtctcttcaagcaagcagctcttctcctatgccattcttggcnttgccctgtcctganggcccatgggggcttnttcctgtnttgaatgggtcgg

SEQ ID NO: 116 - DNA, 360 bp, Homo sapiens
cttattaatacagtatttatttgtcttttctctgtcaaaccctgagccaaccacgttccccaggctgcctggaggtataggaaaaggaacacacggggccaaccagacgcgggagaactatgggaggtggagacggctccttcacatggcaaagaggatgagaaaggctaccatcagacaaaagagccccatggcctccgagaggcaaagccagaatggcgtaggagaagagctgttgcttcagagaagggttcctggcataaccaatgatgaggctcccaaacacagttccaatcccagccccagaaccagccaccccaactgtggcagccccagctccaatgaacttggctgctgtgt

SEQ ID NO: 117 - DNA, 680 bp, Homo sapiens
  misc_feature (1)..(680): n is g, c, a or t
cagggttacaatctgcagtgggagcaggtcaagagcacctcacagctgctgagccgtccgctatctgcagtggtgctgaaacgaccggagatactgacagatgagagcctcagcagcttggcagtctcatgtccccttacctcacttgtctctagccgcagcttccaaaccagcgccatttcaagggacatcgacacagcagccaagttcattggagctggggctgccagcagttggggtgcgtggttctggggctgggattggaactgtgtttgggagcctcatcattggttatgccaggaacccttgtctgaagcaacagctcttctcctacgccattctgggctttctcntcggaggccatggggtcttttgtctgatggtagccttctcatcctgtttgccatgtgaaggatccgtctccacctcccatagttctcccgcgtctggttggcacgtgtgtccttttcctatacgtcccaggcagcctgganacgtggttggacaaggtttgcagagaaagacaataatactgtataatagagaataaaaaaaaaaccgagcgaagctgatccttagtgaggtaattagctggatgcgtcgtttcacgcgtgctggaatctgggtaccacgtatgcttgagacatcctttgcactgttaataggagagccgacgatac

SEQ ID NO: 118 - DNA, 481 bp, Homo sapiens
tggcagctcgggactgagtccaagaatcagcatgattcttcagaggctcttcaggttctcctctgtcattcggtcagccgtctcagtccatttgcggaggaacattggtgttacagcagtggcatttaataaggaacttgatcctatacagaaactctttgtggacaagattagagaatacaaatctaagcgacagacatctggaggacctgttgatgctagttcagagtatcagcaagagctggagagggagctttttaagctcaagcaaatgtttggtaatgcagacatgaatacatttcccaccttcaaatttgaagatcccaaatttgaagtcatcgaaaaaccccaggcctgaagaaataaagtagaattaatctggtaatttgtcacggattagttgtacaactagttagaagtttcagaataaacatgcatttcataactgtcaatgttctctaaatctgagtccagataatta

SEQ ID NO: 119 - DNA, 469 bp, Homo sapiens
ttttttttttttttttttttttttcaacatcaccaaataatttatttggactcagaattaaaagaacatttgacagttatgaaatgcatgtttattctgaaacttctaactagttgtacaactaatccgtgacaaattaccagattaattttactttatttcttcaggcctggggtttttcgatgacttcaaatttgggatcttcaaatttgaaggtgggaaatgtattcatgtctgcattaccaaacatttgcttgagcttaaaaagctccctctccagctcttgctgatactctgaactagcatcaacaggtcctccagatgtctgtcgcttagatttgtattctctaatcttgtccacaaagagtttctgtataggatcaagttccttattaaatgccactgctgtaacaccaatgttcctccgcaaatggactgagacggctgaccgaatgacagaggagaacct

SEQ ID NO: 120 - DNA, 353 bp, Homo sapiens
tgaggggtgtacattttattggaaaccttaaatactgttcagaaagaatatatcttcaatcaaggctcttgtgcagcctacacagaaaaatgaagctttttgggttaggggcaaggagagagacagtacagaggacaaagacccctcacgatgaatgctcttcagccagcttatcagcttttgccacagcttcttcaatgggtccaccatatagaaggcctgttctgggagatggtcatattcacctgccaaaatctgctggaatcctttgatggtctcttcaggggtacagcttcccatatgacctgtgaagactcagaacctggaatggctgagacaagaacgctgttttt

SEQ ID NO: 121 - DNA, 257 bp, Homo sapiens
catgcttccggttctttaatggtgtgttggctgtgggcagtcatccataggtgtctccgaatctgatgtcaaccttggcggctggctcgcctactccagggccttcaccagggcctcgttggctcgattcggatctggatctctgcccgcgtggcctcgtcagctgtccccaccagctccgcctgggccttctccaagtttgccttggctgcccccaggtccaacatgtccagcgtcacggcctcttcggccaacaa

SEQ ID NO: 122 - DNA, 528 bp, Homo sapiens
ttttttgatctgttctggaagctttttattgttgctccaagtttaagaattttcactgatggcagaaaaccaacacttttagacaatctcccgcatagccctgcccagcttctgaatcttggtcttgacagacatgtcaacatatttctcgccaatgcgcacaatcattccacccaagattgacggatcagtcttagcctccaatttcaatacttggccttgacttaggaagctcttgaggacagtttttaattcagagagtgtggcttcttctaaaggagatgcagaggtcactgtgcaaggtacctctccgcgatggacactcatcatggtagaaaaggcagaaacgactccttgggtaatgcctaatcgaccaatttcacgcagccaattggtcaggttggtaatgaagggagaggacctcccctttggcgggaatgtcattagggtttttcccttaatgggaaccctcacatagggatttccaaccggagcacgcacttgggggtccctccagaattgtgcaat

SEQ ID NO: 123 - DNA, 386 bp, Homo sapiens
aaatgaacagagatggtgagttctttatttacaattattgtctagataaaaaaattcataaaaacagatgaatggtcataaattatttaccccctaatggagtgaactgccaaacgtaccccatgctgctagatataggacgcagagtgcaagctttatgtactacagtgagttttgacaaaccaaccatttcgtgtgtgtgtgtgtgtatgtgtgcaagtgtgagagtgagggggtgcatgtgtgcaagcatccttcattcctgacaagagaagaccaacgctaatgttggcattcttccatcgctccctgttccctaagccaggctccactgagaacccctcctggctccaaatgaacatgcaggcatgtgtgcaaacacagct

SEQ ID NO: 124 - DNA, 717 bp, Homo sapiens
  misc_feature (1)..(717): n is g, c, a or t
ttttttctgttctggaagctttttattgttgctccaagtttaagaattttcactgatggcagaaaaccaacacttttagacaatctcccgcatagccctgcccagcttctgaatcttggtcttgacagacatgtcaacatatttctcgccaatgcgcacaatcattccacccaagattgacggatcagtcttagcctccaatttcaatacttggccttgacttaggaagctcttgaggacagtttttaattcagagagtgtggcttcttctaaaggagatgcagaggtcactgtgcaaggtacctctccgcgatggacactcatcatggtagaaaaggcagaaacgactccttgggtattgcttaatcgaccattttcagcaagcaaattgatcaggttggtagtgaggggagagaacctctcttttgctgggatgtcatttaggcttttcactttaatggaacgcttcacatagggattcaaaacagaagcagccactttgggttccttcaggatttgtgctactctcaacaactccttttctacttgctccagcttattctgttntgatgcagcagaataaagagctgtggcatagcgaccttcaataccgtatacctgaacaggaggcctcacaagcttggcaaatggtctgaccacagagggactgaagcatcncacctgccgggagagcccggacactgctggggcaggcat

SEQ ID NO: 125 - DNA, 554 bp, Homo sapiens
ttacgcattatggaacctttatttttcatgtgatttctgtacataaggagtatgagagtaacccttttacaaatggaactaatttactagaacaatgacaaaactgaactggtatttgatgtgaatccacaggagtttaagcttcaaatccagccaagaaatttgttacaatctctttcagctttgcatctgattgttctgagatctttccatcagccctgatagtgcccaacaaggcttggtgctggctgacgacatgagacaagaaagcattctcaaactttgtaatcttgctgggctccagtttatcaagatatccccttacacccgcatagataacagccacttgttcttcaatagccatgggagaatactgtccttgcttcagcaactcagttagacgcacgccacgactcaaaagttgttgagtggcagcatcgaggtcagaaccgaactgggcaaaagcagcaacctcacgatactgagccaattcaggcttcatggtaacgggcaacctgcttgaaagccctggattgggcagcggatccgacacg

SEQ ID NO: 126 - DNA, 615 bp, Homo sapiens
tattttaagttgtttattttaagataatttacaaatatcttgctgtcttcagtaattcaaataatggaggaacagtttcttcggacaaaggcagcagtaagctaaaaacaaaatcaactggctgaattttccttctttacctcttgtctgaggatggaacttgattttcattaatccagagctgcagcaccagagataatttcaatcaactcttttgtgatgacagcttggcgggtacggttgaatgtcaatgtcaatttgtcaatcatctcagaagcattcttgctggcattgtccatggctgtcatcctggcactctgctcactagtggtggactccttcagagagtagtagatgatgttggccagattgtattcttggtaattttgcagcacgtcagcatcaatatcgtcatagatactcatgctgtcagcacttgcaacggtattaagggaaaagatgggcttttcttctgtcttataggagatgacagacctgaatttattaaagatgatggagccttcatcaaattcatatccagaatttagtaattctagggcaatgactgacgcatctccaaagtgggggggcttctcccacttctttgaatgccac

SEQ ID NO: 127 - DNA, 776 bp, Homo sapiens
tttttcattcaattgtcactttattgcaagatggtagaattaattacaaatttaaactataacctgttaatctttagtcaggcagcaagtttttataaaggcaaactgcttattcagaagtgatcacggaacaactcaaaggcagagcaagaaggatgagaaacatctgactggccgatagagatttcgttctctcactatatgaaacaaacttttcatttttaggaagggtaaactataacttcagtagacaccaacacagaaagactttgtcaaatagactagtttccatttagtcagtcaactgtttctagctgtctcaattgggatagatacatttacataactggctgtgcttgagccttctttgccagcagctttaggtccgcaatgcacttggcaattgtctccttttcctgctgtgtggagatgctttgcaccacgtgcttctccacccaatttatcatgtgttcttgttcctttcgacgcatcatgttctgcacagatatatgatagtccaggcgattctttacttccttatatactctatacagtcgttcccggaagtaacttccaaagccatagcaatgttattcctttgcacatcaaaaaggtaatggcgcttctgaaccagtgcctgttgtgacttttccgtatcaattgcatttcttgatgtgtggatggaagcctgcttcgcctcttctagttggggcagtttttgcttaatgagtttatcagcaaagcctgcaacaaaagggaccattttttttaattcc

SEQ ID NO: 128 - DNA, 183 bp, Homo sapiens
ttgtctttaaaacagttaaggtttaatagcttttctacattacaaaaataaaatacaagggcacacagtctggttttagagtaggatttttgtctttttcttcccttaagtcaaaatatcaaagggaaaaaccaaaaggaaaagataaccatggttggttaaagtggatgccacgtgctctct

SEQ ID NO: 129 - DNA, 316 bp, Homo sapiens
  misc_feature (1)..(316): n is g, c, a or t
gggcacattcatctgccagattttcatcgtggaatttngtggtaaacccttcagttgtacaagcctcagcctgtctcagtggctgtggtgtctcttcattgggattggagaacttctgtggggccagttcatctccgcaatacctacccgatccctgaagttcctgaaggaggctgggcatggcaccaccaaagaggagatcaccaaggatgccgagggactggatgagattgaccatgctgagatggagctgcgccgaggccaagatcctctggttccggggcctgnaccgtatccagactcagatctgactgtt

SEQ ID NO: 130 - DNA, 219 bp, Homo sapiens
agccaggctttcccgacttgtctcccgggaaaggacatcctcgctccgccctcctgccggctccttgtgtccgtctctctgacccttcacccgcccgtgccctgcacatataaacagaagcagcctcgagctctcgggagccgactttgtggaagcagagtggagtggagggggctgccaccctcgctgtacacagctgggcccagatggcacttctga

SEQ ID NO: 131 - DNA, 400 bp, Homo sapiens
agaggaatgacaggaactttattctaatattgcatgaaatgtttttgaagtagaaatgattatctgacaaaaaaactccttacactttgaccatctaaaaggttattttctataaaattatataaatatttccatgtccatatatgaacacaacgtttatggtcctaaaagttttaaaaatcaacagaattagattctttagataatgatcagcctagtcagaaaacaacattccccaagcaagcataaagagaggacacaattactgacggacagcggaaatgtgctgcgggctggagtgggggggctgaaaacaaggaaaacacaatcaacagcgcgcttggattttataaaataaaaccctgcaaaaactatatgtaaaaagtgaaactaaccatcc

SEQ ID NO: 132 - DNA, 463 bp, Homo sapiens
  misc_feature (1)..(463): n is g, c, a or t
ctccctgcacggcccaaggngtntcggttttcagtcttctgactgtcacctcgtggggttcagtagagaattcatgtgactagcgcctggccttgtgtggcttggaggaaatggtactgcccaaataggaggaaaacacagcctccctgagcctgcattctgcacgctgcccagggntttcagaaaaggagtggccacagcaccccgaagagcnatctgtttacctggcagtggctctcagagcagcagaacgggttcagttttagactctgaagttggttgtgattgacagaaccctttgggagcaaactagtagagttggattaaattctgggtgaaaccttttctcccacacaaaatagttttagtggnttttttcattgtcccattacttgnccagggnaagttttttagcancacttttgatagattacggcctaaccctcccaaccaaccagcattg

SEQ ID NO: 133 - DNA, 299 bp, Homo sapiens
tttttatttttttttttgggcttagagagggcagttttattgtctcagaggggcagggctgagggagggagctgaggagcaacatccccccaggccccaaggacacacacactctgtccttcccatgggccatggctctgggagcgacccacagaagggagaggaggctcaaactgcccccaggccccagggttctcaggtcagggagttagggaggaacatgaaagtgacatgcttcttagatacatcagcggctgtaaccacagggctgagggggcctccttgctctggagggggtc

SEQ ID NO: 134 - DNA, 425 bp, Homo sapiens
taatcaggtgttctggggcttagataagaaactagctcaacgtaagcatttcccctctgtcaattggctcatcagctacagcaagtatatgcgtgccttggatgaatactatgacaaacacttcacagagttcgttcctctgaggacgaaagctaaggaaattctgcaggaagaagaagacctggcagaaattgtacagcttgtgggaaaggtgagttgttaaattccatggaagatagatctgtgggttacactggggtgtttcaaggacagatagagccttggatattacagattcttgcctagcaaaataaatatttattaaatatttttaattgaaattttctattcattatagtacttagcatggtttttgggtaattgtatgtgagaaagaaacatttgatttacttttatcttgaaag

SEQ ID NO: 135 - DNA, 206 bp, Homo sapiens
ttcttacatcattggttatgatctctggtatttgacagaacacagtgatgagattaggcatgctggtcttaatcctagtttttaaatgaaatgcatctgaaatttctccagtaagtaaagtggtttccctaggtcttagtatattacttttaacacattaaggaagttccgttctattccttgtttgctaagatgtttctaaaaat

SEQ ID NO: 136 - DNA, 608 bp, Homo sapiens
tttttaaggtccatttaatttaacatttattttcattttatatccagatgtcacattttctacattaaaatataatcatgctgactcccccaacccccagccctcagagaaaaaagtgaagaactttacacaacatgaaagatggaatgcacggggtagggaagttgctattgcacccaagtaacaaagaacacagagagaccaacaggacgcatggcagaactgcatagaagatcgctcagggctcacgtcaggaaggcgcaggaattcagaaaactctaaagcttggaaatgctatcgtttgtgccacaaagattaccctgaaaaggtagagagaggtcaaaaagcagaacccaattggggattttcaaaggctgctctctaacagagtttaaaatatccgtaaacataagtgcttctgctccctccccttgccttcagcatctggtaaacactttagaaacttaaaccactgttagcatgtcagaatgtagaaaggctgtaggtttttctttcttctcatcttgtaccccaaacacaactctactggcaattgtatcatgtgactcctccgcttggaaaccagaagggtcaccaagacaaggggt

SEQ ID NO: 137 - DNA, 463 bp, Homo sapiens
ggaatgtatgatttttttaataaaacaattctgcttcagtgcaaatatgtagtccaaaacaacaaaaaaagaaaatgtcttatgtgacttagcacgaacagtttccacagcctttcacactattgacaatttcttcttgtagtttctttctttcctcctctttggatatattttctttctttgcttcccatttggggttatcatggttctgcacacggctgctctgtgtatgccacatttctgaatagatactatgagggttagcaagcaaaccatggtgggtaccagttcggctaccttaccctgatccaagacaatgatttcatctgcatcaaccactgttgacaatctgtgtgcaatgaaaatagaagttctgtgtttgacacatccttcatggcacaagaatagtctcttcagtaatcgaatctaacgatgaagtagcttcatcatagagtatgacggg

SEQ ID NO: 138 - DNA, 819 bp, Homo sapiens
tcaattttaaagaatttattttcccatttgtagtttaacattattgtaaaatctacagttatcgcaatacctgcattgcttaaaagaattcctaagaattttgttaaagcatattttttttaaaaaactgaaccaaaataatgtacattttatctctaaacattgtgtcattaaagtccatataacatcttccgtaaaatcaatgtgatgttacaattatatacatgatctgattcttctcctaaaggcttctctgaccatgtatgatatccaagatagatccaatgcctttaatatcagactgtagagacaattatgatcctaaacaaaagaaggaaaagctgtatatacaagacagcaatatgacagtttagctgtttgcagcatctgcttggcggggccatccttcttcttcaactccagagtcatactcctcttcagaggattcttttgttggagcccggatgtatcctggttccttttttccttctactacttctttgtcaacctccacacatacgatatcagaattagggacttcaaacattggttctagtaacagcttttccattatggaccgaaggcctcgtgcacctgtttttcgttctagtgccaatctggctataggtttcaaagcattctcagtaacattcagttcacacttatccatgcttgataaaggcctgttactgaggaataacagcatttcgtggctcaagttatattggtacaatggtttccttatctaggctatgcaatggaaccaccacaggcacccgtccccacaactcaggattatgccaaaactcaatagaactt

SEQ ID NO: 139 - DNA, 641 bp, Homo sapiens
tttactttctcttagtgctcctttattttcgtgtttccatacacaacattttgggccaaatcacttcaacatgaaaaatgcacaaattttcctatcctctcttctgttctactgcttgcaggctgctgaatgagctctggaagattatagtggatccagactcaggcctgttcagggagctgatgatgacaaagccgaagccctcgttctctttgcggtgaatgaccacatcactggtctgcaggctgtgggaggcgaacttcagggggagaggcattgctactgggggcagcgtggttgctgttggtgtaggttgcgtagtcactgcgtggagagctgtggtgggtggatacagagcctggacttctcccgttctctgggcagggctcccctccacatagcacctttcttctcacagtgaggttgacctgcccattgcgggctgcgtggtgcatgaggtcgatgacatagcggtgggttttgccggctactggaatcccatcaacatacacaagctcatctcctgggtgaaggcggccatctctgtcggctgagcccatggcaatgacagctccaatcaaaataggctgtcccagctcatctcccccgaggattctgaaagccaattcagacttcatcct

SEQ ID NO: 140 - DNA, 442 bp, Homo sapiens
gcgggaaggaagggcaaggcagtagctctcagctctgcactgtcctagtcaggtcctttgcggagggggcagcagggcccacgctgtcgtggagtttgcgcacatgtttctttaagtcaaagtttctgcaaaaccctttgccgcaagtggcgcacgtgaaaggcttcttgtcgttgtgggtgtgcatatggaaggttaggttgtagacctggtggaaggccttgttgcagatggtacatttgtactgcttctcgccgctgtgggtcagcttgtggttcttgtagttccctttttggtgaaagcctttgccgcaaaattcgcagacgaagggcttgtagcccgcgtggatgcggatatgcgtgttgagcgtggagctgcggttgaacgctttgccgcactggttgcatttatgtggcttttcctgggtgtggataattttgtg

SEQ ID NO: 141 - DNA, 568 bp, Homo sapiens
tttccagatacattttttattgtatcacaactggtatatgcaacagtgataaaagtttaagtgagggtatgtgaggttaaagcacctagaccttcaagtatctttaaggctaaagcccaaggaaaaagtcttttgatttggcaagaggatactcctgggtggggggagaaaggcaggctcagaaggaaaagacaacagcctaatataaatatgacaacagttataatctgagcctttggagagcttgaagttctaatgaaagggttggctggctgctggcatagaggatgtctgtgtcagcaggggcagaaagggttttgtatacagaggaaacagacaggacgtggatgagttggaagcaccgagagcaagatcacagagttatgagaaccaaggggaaagtaaagagctttgctttgaagacacagaggattccttttttagactggaaggaaaaaggaggagctaattggaaaaatacaagaaaaaaaatacaagttgacagaaataagatgcacataaagtggatgacagcaactatttttaaggcaggctgcctgcagagagg

SEQ ID NO: 142 - DNA, 347 bp, Homo sapiens
  misc_feature (1)..(347): n is g, c, a or t
ntgaggntgagaactttataccaccnttgtnacactacaccgtgattttaaatctttaatcaaattccaaaggttatcagccatattacatgccatgattagctttctataagcaatttttttnactgtgtacagatcggtgtcaatgaaataaaaaaataaaactgtatactagggcaaagaactttattaatctttgtttcaaacttgattcccagggcttcttcgggcttaattaggctgcaaaggaatgaattgtgtataaggcaaaaactgaaaaggaggctggcagtgtccaagggggcttgggggcttaaaaatattaggaggatcccaggattttatcc

SEQ ID NO: 143 - DNA, 497 bp, Homo sapiens
  misc_feature (1)..(497): n is g, c, a or t
gaactgctcgcagaaagaagaaggtggttcatagaacagccacagcagatgacaaaaaacttcagttctccttaaagaagttaggggtaaacaatatctctggtattgaagaggtgaatatgtttacaaaccaaggaacagtgatccactttaacaaccctaaagttcaggcatctctggcagcgaacactttcaccattacaggccatgctgagacaaagcagctgacagaaatgctacccagcatcttaaaccagcttggtgcggatagtctgactagtttaaggagactggccgaagctctgcccaaacaatctgtggatggaaaagcaccacttgctactggagaggatgatgatgatggaagttccagatcttgtgggagaattttgattgaggctttccaagnattgagngcaanctgaatttgagttcaactttttgaaggttaaaacctgaangaagtttacttggggagctgctattttatttttttn

SEQ ID NO: 144 - DNA, 646 bp, Homo sapiens
  misc_feature (1)..(646): n is g, c, a or t
tatctcacactgtactttatttttcttcacaatattaactagacagacaaggaaagtttaatggcaatgtgactttttccaacaacacaaacaaagtgccattatagctaatggtggccaactggagacttactttaccttaaccatgtaaagtatccttaccgtattttttatgtgtacagtgttgcagaatatcagccacctcttaaaagtatcaatcttaaaaagagccatggaaggtaaaagtatgaaaatcttgataacaaaagctttcaatacaaaaacacttattgtacacttatttttatttaaaacaaaaataaccccagtaactcaaaacaaaagcaaaccttggttgaaaacttaagaaggtataataaacaaaaccaccaaaagaaagcttccccaaaagaaatgcaatccactgtcactcttgcaaattctaccttggagggaaaaacttaatgaaatgagctatctggagggcccacggagattttccaaaaggtttaggtgcatggatttactcagtatctacntacagtcttatttattaatagctcaganttcctgattgagcgagcctttccatctccaccagtgtccccacttctgtgcncacttgggntgcagacaccctgtgttg

SEQ ID NO: 145 - DNA, 465 bp, Homo sapiens
ggtatttaaacaataaatgtgcagttttaactaacaggatatttaatgacaaccttctggttggtagggacatctgtttctaaatgtttattatgtacaatacagaaaaaaattttataaaattaagcaatgtgaaactgaattggagagtgataatacaagtcctttagtcttacccagtgaatcattctgttccatgtctttggacaaccatgaccttggacaatcatgaaatatgcatctcactggatgcaaagaaaatcagatggagcatgaatggtactgtaccggttcatctggactgccccagaaaaataacttcaagcaaacatcctatcaacaacaaggttgttctgcataccaagctgagcacagaagatgggaacactggtggaggatggaaaggctcgctcaatcaagaaaattctgagactattaataaataagactgtagtgtagatactg

SEQ ID NO: 146 - DNA, 600 bp, Homo sapiens
ttttttttttgacttttcaacattttattcttatatttgtacagctatattttacaacgcggtaatgcagtttagacacagccaaaccctgtctccggagtagttataacacaagcatgacgcagaatgggatgagacaaacattcccaaagagagtttagttagtaacaacttcaagtccctgtgtctgcctacacttcaaaaagggatggtgcacgctcgcccatcattgaaaacttccgtgaaaaaaggcaccgtgaggacacgttgtacgggtatatacaaactgaaaactagaacaaaattacacatttttccttctgcagatttttttggtctttttgtgttttttaatacacactttgtaaattgtaaaccttcacttgcaaaaaaatacaaatacactgaggcattttaggcaaatattttcctacttgtacagatgcgatactttaaatattctcctaagtgggcgtgcgcttttaaggtctcaggggcggggggatgatttttgtttttattttttttttgtttttttatttttgtggtgtggtgtgtgggtccgtgttatgtttgtgtttgtttgtattgctttcgccc

SEQ ID NO: 147 - DNA, 397 bp, Homo sapiens
ttggtttaaaatattttttttattgcccaggatatttttttgttgtgccttgccttttttttttgttttgttttctttttaataactatcaactcaaacttagggaaacttgcctttgtcttgggggaaaaaaaacaactagacaataaagcttcttttacatcatttgctaacctgatctcgttttaagagagagatggtagttatgttgcaagagtaaaatttataccatgaatgatacaggtctagtctggtggcactaattagagataatagcattgctgacaaaattataatctgctggtggcatttgcggaaaagaagcccttgcaaatttctaaacaacagtaaactctgttaggaaattctaaaatgtcttcaggccaaaaagggtata

SEQ ID NO: 148 - DNA, 409 bp, Homo sapiens
  misc_feature (1)..(409): n is g, c, a or t
ctatgttccccaggattcagctattctggaagatcagcaccctaagagatgggactaggacctgagcctggtcctggccgtccctaagcatgtgtcccaggagcaggacctactaggagaggggggccaaggtcctgctcaactctacccctgctcccattcctccctccggccatactgcctttgcagttggactctcagggattctgggcttggggtgtggggtngggtngagtcgcagacagagctgtctgaactcacgtgtcagaagcctccaagcctncctcccaaggtcctctcagttctctcccttcctctctccttatagacacttgctcccaacccattncactacaggtnaaggcttttcacccccatcctggggnccttnggttgagttgcctggtta

SEQ ID NO: 149 - DNA, 449 bp, Homo sapiens
  misc_feature (1)..(449): n is g, c, a or t
annagtggatattncacagtttatttccaaacactcagagganagggggtggcctatgggtccatctgcctcccctccctgcatttggctgaatcaagaacttctcccccctgacccccaagaccctaggctgtgccaatagagaaggcactgtcaccccccaccctgaggagacctagacaggtgaggagcatggagggtgggggaacagagttcaagtattcacagttcccccatctacaccccgggattacactgtgccagagccatgagggaggatcccacctctgggattcctagtgggtgttgatagtccttctcccacttaggaaccctccagatgaactccctactccttttccctggaaataacaaaccaaggtcctaaggccctgtagtttggggcaagggagggagtntaggnagggccattnacccaagggcccntt

SEQ ID NO: 150 - DNA, 316 bp, Homo sapiens
tttttttgggtcccgaaggaggtttattaccccctcaagaccactcttccccacaccccccaataattacaaaagtaagaaaaatgcccacgtcccccaatccccacccctcccagaaaaatgccataatttatggaggaaaaacacagtccaaggcagctgggggcctcagcccatcttcttccagatggtgagtgaggcggtgagcactcccgccacaaagatggtcacggtctgccacgtgggcgtcccaaagtaggagaggagggccgtcccaaccaccctggtctttggatccagccaacagccgctcccg

SEQ ID NO: 151 - DNA, 418 bp, Homo sapiens
tttttttttttttttggaaaccaacattttattgagcactcctgctcctcggaatctattccagtagattctttgccgagggcatcacatatcacacaggggtgtgaccagcactccccctgctacctgccgtgtgggcaggggcaggagtgaatggctcttcctgggcacaggccacagttaaccggtgacaattgcagagccataggaattcatcttttagaaaaaacgaaaactggaataaaaaaaaacaaaaaacctgagtataaaacctcagcagtgttccagcactatctcggggtttaaatataaaaaggcatcatgagaaaacagttaaaaagataacagcagcaggccgccacctccagggcagtggtcatgggggtggggccagccccgccctgagccgccggggcct

SEQ ID NO: 152 - DNA, 407 bp, Homo sapiens
  misc_feature (1)..(407): n is g, c, a or t
ttcactgagtaaacacagtttattactgaactgcactttcaccttcacacagactatttcaaagagctggaacaagtgtggggtgggggttgggggaggggcagatgcctcantggagccaggaccctcggccagcttccctggaccagggcaggggagggagcatcaggccgtccaatctccgggcaccagctctccacgtgcacgcgcactgcaagccagcagctcctcacacataaatacagacacgcttaacaaaaatagtatatcatcttcacaaggaataaaaactagtctcaaatatgtacagcagagagcccggggtggctgggacccctggggatagagacaggccaagggtggagcagaagagagagggaggcctgaagagctcctggccaggccac

SEQ ID NO: 153 - DNA, 694 bp, Homo sapiens
  misc_feature (1)..(694): n is g, c, a or t
tagtgtggcagatgtttattgagctagaggaggagagctgagctgagcccagcctgatcacctcctcagagactcagcattgtgaattgcccctacagggtcatttttatacagcatgaagtagccctgcacctgggcaggactgatctggtttgtagctcgaaggacatgttctgcaaagttctcagctaaggaaggtgcctgccctggatagaacctctggaacatctgggtcagctgccagtgtgagcagtagcccacgtactccttcaggtccactcgccccgggcgtatcagggcagggtccagcctgtcaacgtggttggtggtcatgaacacgatgcgggcctcggtggaagccacaccatccaaggcattgagcagtccactgaaggtgaggcgacctaggccttggtactttactgggttctccacagccaagtctcgactgagaaaagcagcatccacatcctccaggagtaccaggctctgctgcggggccacgctcagcaggtggttgagtcggtcatcagagaggctggagtccgtgaggctcagcaggcagatgctgtgctcagttccccagccagggctgtgatanaactgctctttccgcaaccagggggcccataaagcagtagccacgtctgtnaggggatgcctctgtcatgtaccactttgggttatcgatgaa

SEQ ID NO: 154 - DNA, 457 bp, Homo sapiens
ttaaaggaagtcaaaaactttattcagcttataaaattccatgttccaagaacatgctctaagcatgcagaaagcacaggacactgctcccgggtgggggctcaggtggggcaacctctgaagctctgctgacccctgggccaaggccctgacagactagcaggcccagtggtcatgaaagcgtgacggccaccacatcacaagcgtgatggcacctgctggtgcagctgcagtccctggtgggccgggcactcactctggcagccgccgtcccccatgccagccatggttgtcccgccatacgcagtaggttgagtgtggtcgcgaaggccagccaggccaggtaggggtagagcaggcgggcggccagcgggctcacctggtaccaggccacggtagtgtgaccggccgccccaactgaccagcaggagattcaccaaggccccgcccatttgtc

SEQ ID NO: 155 - DNA, 121 bp, Homo sapiens
gcagtctgggtgcatggaacaaatttagactaattggccctcgcaatgatcagtcctaggaccctggccttattattagcatggtgctttaaccaattgtacataataataccactgatag

SEQ ID NO: 156 - DNA, 341 bp, Homo sapiens
  misc_feature (1)..(341): n is g, c, a or t
aaatggacattttcattcaagtatattaatgtagatattttaaagtgggttataagtttaacattgtctttaaaatagaagtcacagctatcttccagcctgtcttctctaggaacgctgttgacatgccagggctccgtctacactggaagcagctatacagctgtgaccacatcgagctttanccagtcacactttctggaactggtccgttcaagtccatcccaattnctgggctaaagctccctcacggtaggtgcngtaggttcctgggttnaataaagttccactggttggtggtggaaaagaccattcacgggnggcaaaggaccgggcgttgt

SEQ ID NO: 157 - DNA, 145 bp, Homo sapiens
  misc_feature (1)..(145): n is g, c, a or t
ngaantattgccaggcacctcgccaggtcggggacagcatggaccgtagcatcctccggcctggtgaacggcctggcctgcagctcaggaacaccagccggtcggaggaggacggaacagggacctggccactgcctggaanagc

SEQ ID NO: 158 - DNA, 470 bp, Homo sapiens
tttttttttttttttttttttttggcattcaaaatgtgaactttaataacaggtcagagtgggggttccccaggaacgagaatgacggaactggtgctggaggcctcagggtgcccacttccctgctccaagttctggaggcgaggaggcaatggaccctgttgaggcagggcagtgccagcatccatgtaagtccatctgtctgggtccctgagacccaagatgcagcagtgtgtggagcagggggccgccctgcctgacccgggaggtcctgcagggaatgcggcccaggctggtcgggtgagcaggccaaaggctgtggggtcagatccggaagctttcctcccggccatcgatgtggcggacgcaaggtagacgtccgtgccaatgccctgcagggactgcgactgcaaagacccaccggggtaatccgcgtaggcccgtaaagtggggaacccgaagccaagccc

SEQ ID NO: 159 - DNA, 556 bp, Homo sapiens
ttttttttgttctttggcattttatttcaaaattgcagcaaagacagagaaaaaaaaatcaacggcagcaccaggggtctggcctgagaacggagagatccggaatcggggccaaggtgtatccttgaccgcacgacaaggagtaatgggcggacctgaacccgcgacgaggggctgggggccaagatgcctgggtcggcccttacggctttgggagtgtcgcaaccacatgggggcgccagagacccagacgccgcccgctggccttttatttcgtattgcacttcaggtgagtcattggtagggaggcgagtgctggcgtgacgagatgctacgggtcggtggatctggagcacagcctgcagcttcacaccgggaacatccactcgtgggctctgattccgtactggatctccttcagctccttctggaagcggaggatcagctcaggcccattttcccaggtgggaaagtggaggttcctgtctttgtacaggattcggtgcactgggcaaacctggcaaacggtgcccgagccaaagacttcccggacgcg

SEQ ID NO: 160 - DNA, 163 bp, Homo sapiens
agtctttggctcgggcaccgactgccaggtctgcccagtgcaccgaatcctgtacaaagacaggaacctccacattcccaccatggaaaatgggcctgagctgatccgccgcttccagaaggagctgaaggagatccagtacggaatcagagcccacgagtgg

SEQ ID NO: 161 - DNA, 551 bp, Homo sapiens
ccaggcgcagagatgcagtttattcgtgacctctgctggccactcgcacctgcgcaagttccacaggctgacctgccatgtccaccccatgcccagaggggcttctagtcctgaatgtgccctcacccagcccctgggagaaggcactgtaacaacaggtgaagagggggctgacggagcctcagcaactgctgcagatgctgtcccctgacaatgtaacagccgggaggagcaggggtgaagagtggcagccgccctggccgctgagtattttagagggagctgactggggaagacagtggtgtgctgtcaggtccccctgctccccttagagtggggctacctctcggggtagctgaggatgggtgggggtgggctgagcaggtctcacttatcgaagtgatccagtgggtagtgctccccgtaggtctgcaggtggcgggccagagactcctgctgcttgcggagctgggcgggcatctcctgatacacgtctgagaagagcaggttggggttgggtttgggcttccgctcggcctgctcaaaggcct

SEQ ID NO: 162 - DNA, 570 bp, Homo sapiens
gcggcgatggcattgcagcacgaggccccgggtatggcatcatgtcaatccgcgtggatggtaatgatgtgtttgccgtatacaacgccacaaaggaggcccgacggcggcgtgtggcagagaaccagccctttctcatcgaggccatgacctacaggatcgggcaccacagcaccagtgacgacagttcagcgtaccgctcggtggatgaggtcaattactgggataaacaggaccaccccatctcccggctgcggcactatctgctgagccaaggctggtgggatgaggagcaggagaaggcctggaggaagcagtcccgcagaaggtgatggaggcctttgagcaggccgagcggaacccaaacccaaccccaacctgctcttctcagacgtgtatcaggagatgcccgcccagctccgcaagcagcaggagtctctggcccgccacctgcagacctacggggagcactacccactggatcacttcgataagtgagacctgctcagcccacccccacccatcctcagctaccccgagaggtagccccactctaaggggagcaggggg

SEQ ID NO: 163 - DNA, 302 bp, Homo sapiens
ttacaatttgattttactttatgtgaatactatcacacacataatatttacagatgtaattaaacagaatttataagattaccatgtggaatatttttcaaagttaatctgaaactcttaatgaaaatcatcaatacatgtgtgttacaatacaataatagaatgtagaacttttcagccaatatcatgatggttcatttaataaaaactctcttttcaaaaagaggtaagtcggaggaaatataaaaaaaaattcagaaaaaatatttccatatctagtcataatcttccagcttttctgt

SEQ ID NO: 164 - DNA, 554 bp, Homo sapiens
cataatccctacattttctgtctgttctagtctaagaatattgttatagatggaagttaggaccaattagcccacagatgcgtgtattctctcagacataccggtgtagatgccatatttctgatgtcttcttaatgtctgtgaaagcaactggcatctacaataaatcacacttagaactggttagaggactccctcacttttgttgtccatgtggttcccttccgtggaccagccgtaataaagagccaaggtagtgatggtggccacgtgcctcgttgctatttttaaagtaatattcagatgtggttttaaatttagattatgtattccttttgaaacataagaaaaacatttaaacctatgctgaaaatacgataaaagaaaaacaactccaatatgctaaaagttaaatatggtatttaagaaaatagtcatgtatgcattgagaaagtctataatttattttacagaaaagctggaagattatgactagatatggaaatattttttctgaattttttgttataattcctccggactacctctttttg

SEQ ID NO: 165 - DNA, 380 bp, Homo sapiens
  misc_feature (1)..(380): n is g, c, a or t
agaatggagctgttggggagggacatgcacacaatgtaaaacagacaaaatgcattacaactgtggtgtaatgtggccactatgaatccctatgtataagaggaaagaggctggctgcagcttcagccacaggatggggactggggaagacagagcaggagctcatttcctctgcacattttggctgttagatttgtgtgtgtgtttaaaaaaagagaagccagtgctcattttttgtatttaaatattaaaagtgattcccaactgaaaaaaaaaggcttttccccaaantaaacacaggattacaggtaaaatanttattgtggtaaaatattaatccaatatccaatatattaatccaaatatatataatatatgcc

SEQ ID NO: 166 - DNA, 377 bp, Homo sapiens
ttgatcaaaattaagtcacagattgccagatacaaactgaccacaagcacgtacttcctataccatatgtacgtctaagtccctttctaagaatacattccaatttagtatgaatagaaattacatttatagtctttagaaatataatcagttaataacttgattatattttctgcatatattatatatatttgattatatattgatattgattatattttacacaataattattttactgtattctgtgtttattttggggaaaagcctttttttttcagttgggaatcacttttaatatttaaatacaaaaaatgaggcactgggcttctctttttttaaacacacacacaaatctaacagccaaaatgtgccgg

SEQ ID NO: 167 - DNA, 287 bp, Homo sapiens
  misc_feature (1)..(287): n is g, c, a or t
gacaatttaattgcaaaagacacagaatattaaggcataacaaagtaaactgaaatgaagtttagttatcaatattcatctctgagaaagttgtgaatcagttcctttagataacatgtggctcaggttgatttaataatggggctggggtgtctgcatctctatgctgcttttccagcactgtactgcctgtagtggaaaagactcttggagtccaccttgcgagatttctgcacagcttcagccaaaaagtttgggncaccccgaaaattaggtgagggagaggg

SEQ ID NO: 168 - DNA, 131 bp, Homo sapiens
gtttcttggtgctaaggcaactagacttgaaaggatttcatttaaccctcaatgtaaaaccaggttatataattgtaggtagataggggaatttggcagagagataatcgtgtacaattatttgttctttt

SEQ ID NO: 169 - DNA, 467 bp, Homo sapiens
ttgagacggagtctcgctctgtctcccaggctgaagtgcagtggcgcgccagcagcacaaggaaagcagcaccttctagctctcctccgccttctccgcgaagcccctgaccctgctcccagaacagggagcggagaggagaaagtcctcgagccccagctggcactcacctgatgccttggtggcatcgtcaaattccacctggaagaggtagccagtgttccagatgtacaggcaggatgccacgtcataggagaccctgagtggcttcagccaggggtcatagacgctgtccctccactggatgttgataggagactgccgggtgccccctggcacggagaccgggcccgtccagagtgggtgcactgcagggagagagaaggagaccccgagtgaggcatgagcttcatcctgtgtcttggacggatagggcagaaacctggccgcacgagaccccacaggta

SEQ ID NO: 170 - DNA, 142 bp, Homo sapiens
tttcaccaacacaattcccctttattgatgaccttccacattaatatcatacagcagggcgggggcaggaaccaagctgagtggaaccagaggcggctcgctagcaatgttatccacaggagcacagccgcaacggaggtga

SEQ ID NO: 171 - DNA, 350 bp, Homo sapiens
  misc_feature (1)..(350): n is g, c, a or t
nanttttaacatatttattgagcatctttaatgtgtcaggcactgtnctcagcattgaggcaatggaatggatgaataaatgcacagcaagtgaaaatcaacaggctttcctttccagcccagcacatgancttggtgatgtccatggtctcctccaaggccttgtttccatatgctgagactttccactttgtctcaagtatctgancttgggtccttgacttataatccccgtctcaggggcaagagaacttgggaagaaatgtgggaaattgatgagggttctctcccacaagggatgtacggncacaccataggccgtnatcaggcaaccgggtccaaaggccccc

SEQ ID NO: 172 - DNA, 433 bp, Homo sapiens
gacgacgtggatttccattccttcccattcgtagcctttggtaaaggaatcatcaagaaatgtcgcacgagcccagacgcctttgtgcagctggccctccagctggcgcactacaaggacatgggcaagttttgcctcacatacgaggcctccatgacccggctcttccgagaggggaggacggagaccgtggcgctcctgcaccactgagtcatgcgacttcgtgcgggccatggtggacccggcccagacggtggaacagaggctgaagttgttcaagttggcgtctgagaagcatcagcatatgtatcgccttcgccatgaccggctttgggatcgattcgttcacctctttcttgcctttaacgtgggtgttttaaaatatcttcgctgtgggagttcccttttccttaaaggaagtttttatctgagg

SEQ ID NO: 173 - DNA, 398 bp, Homo sapiens
  misc_feature (1)..(398): n is g, c, a or t
ctgaggcaagtatttattccaagcaaacacgtgggcgtggacagctatctcagagcctacgtcactcagcagagtcacacatttcaaagcaggtcacacaagtccctcatgaacagtcttccagcttcagcccttctcttgccacctctgtggtctgagctgggggagggggagggcctccgagttcccagacaaaacacaggtacctaagggcttcagctcgtaggccttgggaacttggaaaagatcagcaatgtccagcagggctttgcggatgtggtttccaaagcgctgggcgttccgtctctgaagcttgagaacttggctnggagatgttggaagaagatcgtgttctcgcctgcaatcatgtaggaaactccatagccatcatctgctac

SEQ ID NO: 174 - DNA, 521 bp, Homo sapiens
  misc_feature (1)..(521): n is g, c, a or t
gagactgtgcgttcctgtaccagcgagtccacagcctttgtgcaggccatgatggaggggtcccacacaaaagcagacctgcgagatctcttccagaaggctgctaagaagcaccagaatatgtaccgcctggccatgaccggggcagggatcgacaggcacctcttctgcctttacttggtctccaagtacctaggagtcagctctcctttccttgctgaggtgctctcggaaccctggcgtctctccaccaagccagatcccccaatcccaagatccgcatgttcgacccagaagcaagcaccccaaatcaccctgggcgctggaggtggcttttggccctgtaagcaagatgatgggctatgngagtttcctacatgattgcaaggcgaagaacacgatcttcttccacatctccagcaagttctcaaagctcagagacgaacgcccagcgctttgggaaaancacatncgcaaaagccctgctggaaaattgctgatcttttccaagttnccaaagg

SEQ ID NO: 175 - DNA, 302 bp, Homo sapiens
  misc_feature (1)..(302): n is g, c, a or t
ttanttattcaaaaaagtttattattcagcagacataattccaaaaacctttacagaaggatctcttcacttnctgcccacagacattcatacagtttccttattttaatgtcctgggagaggtaganacatcttgtcaaaagtcactctttcagtggtgggcatctgcgctctaccatctggctgctcaaatgaaaatcgaaccttgcggnaaatttcctccacatcacagggacaggcatattcttgcatatgttcaatgngtcttncnattaaaaccggancccttgtnggntgtctcc

SEQ ID NO: 176 - DNA, 406 bp, Homo sapiens
  misc_feature (1)..(406): n is g, c, a or t
tctcatggtattcgggaaggcatttgtgggaagaaacactctgagcaagtcccagatatattacaactcaatgcaatctttaacatgttgaataccaagaactgcccaagtttgaaggacaaaccgaagngaattcatcatccaggcctgccgtggtgacagccctgggtgtggtgtggtttaaagattcagtaggagtttctggaaacctatctttaccaactacagaagagtttgaggatgatgctattaagaaagcccacatagagaaggattttatcgctttctgctcttccncaccagataatgttttcttnggagacatcccacatggggctctgtttttattnggaaggactcctttgaacctnttgcaaggnttttgcccgtttccccttgatgttgg

SEQ ID NO: 177 - DNA, 401 bp, Homo sapiens
  misc_feature (1)..(401): n is g, c, a or t
gacctactctcatgctgcagagggtactttaagacatactccttccatcaaatagaaccactatgaagctacctcaaacttccagtcaggtagttgcaattgaattaaattaggaataaataaaaatggatactggtgcagtcattatgagaggcaatgattgttaatttacagctttcatgattaggcaagttacagtgatgctgtgctatggaattttcaagtaattgtggaaaaagttaaaacattggaaggtaatggaattttttatggtattccccccactttaaggactgtgttatttctaggtttttgttcaaactgttgggaaatggtggtgtgggggagggacttaggggccntctgtggggggcntggggtccaaagggctcccaaacccc

SEQ ID NO: 178 - DNA, 428 bp, Homo sapiens
  misc_feature (1)..(428): n is g, c, a or t
tttttttttttaattttaagtttgaatgtatattttgaaataaaaatggaaaataacaaatttgtacaaaattgtcacatagaaacacactttaagataccattacatgctatgtgtatttacaaaagttacaggtctagtaagaaaaaagaaactgtcattgacaaatgcgagctcattttttgagcaacaaggaaatctcccgtgnaaatgtcatactgacagccagtgaggacttgggtgacagtgacggctccgcacctgctgaggccnggngcctgcctcccgggctgagggctcagctctgggcctccggctgggatgccctctaggaggtcctatgtggcttcatagggncttttttctttcaggttaaacagttntaaaaaccttactattttncccttggattggtaaatctttccanc

SEQ ID NO: 179 - DNA, 438 bp, Homo sapiens
  misc_feature (1)..(438): n is g, c, a, or t
tgagccatggtgaagaaggaataatttttggaacaaatggacctgttgacctgaaaaaaataacaaactttttcagaggggatcgttgtagaagtctaactggaaaacccaaacttttcattattcaggcctgccgtcggtacagaactggactgtggcattgagacagacagtggtgttgatgatgacatggcgtgtcataaaataccagtggaggccgacttcttgtatgcatactccacatgcacctggttattattcttggcgaaattcaaaggatggctcctggttcatccagtctgctttgtgccatgctgaaacagtatgccgacaagcttgaatttatgcacattcttacccgggttaaccnaaagtggcaacagaatttgagtccttttcctttgacgctacttttcatgcanagaaacagattccatn

SEQ ID NO: 180 - DNA, 445 bp, Homo sapiens
  misc_feature (1)..(445): n is g, c, a or t
gtgagcatggaaacaatacatggaatctgtttctttgcatgaaaagtagcgtcaaaggaaaaggactcaaattctgttgccacctttcggttaacccgggtaagaatgtgcataaattcaagcttgtcggcatactgtttcagcatggcacaaagcgactggatgaaccaggagccatcctttgaatttcgccaagaataataaccaggtgctgtggagtatgcatacaagaagtcggcctccactggtattttatgacacgccatgtcatcatcaacaccactgtctgtctcaatgccacagtccagttctgtaccacggcaggcctnaataatgaaaagtttngggttttccagttagacttctacaacgatcccctctgaaaaagtttgttatttttttcaggtcaacaggtccatttggttccaaaaatttattccttctt

SEQ ID NO: 181 - DNA, 327 bp, Homo sapiens
ttttttttaaaatattcaaaattcatattttattacatttttctaactcacattcttgttcatttgtgtaattgatagatgttttttactcggtcatttaaatgtttaatatttcatctacatatgaattaccacattttgtgtatgactttaattcctactttaaaaaaaatcagcattccagaattgttgtatggcattctgaggatgaaatagaaaacataattcttagccactataggttgaacacctgcaaaatctgattctgtcagcatcttccatgttaagttcctacaaacagtccaacagtcatcagacccattcaca

SEQ ID NO: 182 - DNA, 382 bp, Homo sapiens
  misc_feature (1)..(382): n is g, c, a or t
cagtacctataaatttatgaacctgcttttcttctgggcagcatgatattaatggttcctaaaggcttctctttttatgctgcagctggactacttactactgatccacgtgtgagggaacggaagaagccaggccaagagggagcccgcagaaagtttacgtggaagaaacgctaagggtttgctcccaggaaaggagaggaagagctatatatatgtgccgacatgtggcagacacacagtaaataatggctgaccagcatgagggcagtactgtcagaaatttctttgagctgtgagatggatttatttttaaaatgctacttttgtnaaaggtgaccttttaaaaattaaanggaaattaaaaaaaacctccgtggcc

SEQ ID NO: 183 - DNA, 330 bp, Homo sapiens
  misc_feature (1)..(330): n is g, c, a or t
tttaaaggtcacctttacaaagtanctntntaaaaataaatccatctcacagttcaaagaaatttctgacagtactgccctcatgctggtcagccattatttactgtgtgtctgccacatgtcggcacatatatatagctcttcctctcctttcctgggagcaaacccttagcgtttcttccacgtaaactttctgcgggctccctcttggcctggcttcttccgttccctcacacgtggatcagtagtaagtagtccagctgcagcataaaaagagaagcctttaggaaccattaatatgcatgctgcccagaagaaaagcaggttcat

SEQ ID NO: 184 - DNA, 391 bp, Homo sapiens
gcggccgccggaaaagcgcttcggccacatccagcagcagtagcagccgcaagaccgggactcgaaggcccaccgcagccggactaagtcgtccaaggagccgccttcggactacaaggaaccgcccaaggcctaccgggaggacaagaccgagcctaaggctacagcggcggcggtccctcagcccactgggaggccgggacgacagcccggtgtcccacagggcctctcagagcctgaggagccgcaagttccccagcccggcaggaggtggcagcagccctattctcggcggctgccgcgctccacgagcccctacagtcgccgccgctcccccagctacagccgccacagctcctacgagcggggcgcgacgtgtcccctagtccct

SEQ ID NO: 185 - DNA, 408 bp, Homo sapiens
  misc_feature (1)..(408): n is g, c, a or t
ttttttaatttgtaaatattgtacaaattttaatagcttaaattgtatatacagccaaataaaaacttgcattaacaattggtggggtttgtgtcacagaatcgatcaaatcagtgtcgggctccttgcttggctgtacacttgaaaatggaatggaatctccaggagtgagggtttccatggaagccagcactatccttggggacaccactgaccattaacagattaggaagatgtgcccattttacacacagagaagcagcccagagttcagtgccctgcttcaggnacgacgaccaagttggggagtcaggaactgaaagctgtcttagccaagtttgggggcanggtggggtctcagggaggctgccagccactaaggggtaggataatgttcatgctttaggg

SEQ ID NO: 186 - DNA, 488 bp, Homo sapiens
agcaggtaaagatggcagctaccatgttccgggctacgctgcggggatggagaaccggtgtccagcggggctgcgggctacggctgttgagccagacccagggccctccagattaccccaggtttgtggagtctgtggatgaatatcagtttgtggagcgcctgttaccggctaccaggatcccagatcccccaaagcatgaacattatcctacccctagtggctggcagctccctgagaccccaccctgcccccaaactggctaagacaagctttcagttcctgactccccaacttggtctctgccctgaagcagggacctgaactctgggctgcttctctgtgtgtaaaatgggcacatcttcctaatctgttaatggtcagtggtgtccccaaggatagtgctggcttccatggaaaccctcactcctggagattccattccattttcaagtgtacagccaagcaaggagcccgacactgatttg

SEQ ID NO: 187 - DNA, 357 bp, Homo sapiens
caagctgcttcgggcagtttattgaggttttcacgttggggtaggggaagtggcacacacatgctcttgctgtgtacacacagtgaaggacctctcccgcaggcaagcacatgcccacagcttgagcacactgtccatgcatctcctgtccccaacaggcagtcgtggcctttggggcctggcaagttccgagctggctacgcccatgcttctccagggtgctggcgacctggcaaggactagggcagtcccccactgcacccccagctcctgaggccaaacccagggcttcccactgcctggcagaggagccctctgtgaccgccaactctccttctgtggtccgggcaggatggt

SEQ ID NO: 188 - DNA, 448 bp, Homo sapiens
  misc_feature (1)..(448): n is g, c, a or t
agcaggancaagtttaataaacgtttattgagcagtagaatacaagtgagtnccngganccngatcaccaagtcctgtacaactgaggtaattatttcacaatgatgggtggctcagtgagattctgattgcatgcgctgcatgacaaattatctactcagagtatgcctgacacgccggagggctngagggggaacacactgaaagcagtaccagggagcagtgcatctcacaganccatttnttcatgccatgaagtaaacggtacttatacaagtgtacagtgacgttccacgntccccatctaacacggnttgctggaantttacaggcagactgacgttttctttcacatgtactccaagtaaatctggttagtgatgaccngggggcaggcgctgaagcttttcaaagccttacttcttttatcagcagcccggntttttat

SEQ ID NO: 189 - DNA, 346 bp, Homo sapiens
  misc_feature (1)..(346): n is g, c, a or t
cagatttgtggtgcgttctgagccgnctgtcctgngccaagacncttcaaaggcancatgaaaanacagactgnctcctatgaagccctactacaccaaagtttaccaggagatttggataggaatggggctgatgggcttcatcgtttataaaatccgggctgctgataaaagaagtaaggctttgaaagcttcagcgcnctgctcctgggtcatcactaaccagatttacttgggagtacatgtgaaagaaaacgtcagtcttgcctgtaaaatttcagcaagccgtgttaggatggggagcgtggaacgtcacttgtacacttgtattaagtaccnttttact

SEQ ID NO: 190 - DNA, 282 bp, Homo sapiens
ttttttttttattttaatattttttattaagggctataaaaatacccagaaagataaataaatgtgatgcaatgatatctgtcctaatatgaagaactttctttcactgcattgttttccttcacaatggccttcaaatcacaggaggcagtgattccatgccatttcctcttcttttattacacgctacaggatttctgaatcagtatccccgccctcagtcttctctttataaatcaaagtcattttcaatccaccgtttaaagggagcgtatttgtttc

SEQ ID NO: 191 - DNA, 566 bp, Homo sapiens
  misc_feature (1)..(566): n is g, c, a or t
ttgttcttgcagcccggcatgccagtgcttcctccacgaatttgaaagacatattggctgacctgatacctaaggagcaggccagaattaagaccttcaggcagcaacatggcaagacggtggtgggccaaatcactgtggacatgatgtatggtggcatgagaggcatgaagggattggtctatgaaacatcagttcttgatcctgatgagggcatccgtttccgaggctttagtatccctgaatgccagaaactgctacccaaggctaagggtggggaagaacccctgcctgagggcttattttggctgctggtaactggacatatcccaacagaggaacaggtatcttggctctcaaaagagtgggcaaagagggcagctctgccttcccatgtggtcaccatgctggacaactttcccaccaatctacaccccatgtctcagctcagtgcagctgttacagccctcaacagtgaaagtaactttgcccgagcatatgcacagggtatcagccgaaccaagtactgggagttgatttatgangactctatggatctaatcgca

SEQ ID NO: 192 - DNA, 434 bp, Homo sapiens
  misc_feature (1)..(434): n is g, c, a or t
tttttgagtgggatctcactttaatggagaggacgttatgacctccggggcatggctcttggcttggnaagcccctggttttcatggacctgtcgatccacttgaggaaggcggtgaccttggtgtagatcccgtacttccccttacgggcacagctnctccccagctgacgatgcctgtcacgaataggtgtccttgaagcgggtgacgtgcgggcccccntngtccccctggcaggcatcctcctgcttggtgtcgtagccggcacagaacatgttctgggtgatgatgaagctgctggacanttgcagtgtttgcngtccacgtagggcacctccagcatcttgaagcctggtggactgccggcccttctcgtgggtgcgcccgaagccgctcacaatccccgtcttctgcgtcatcagcgtggantcggg

SEQ ID NO: 193 - DNA, 612 bp, Homo sapiens
  misc_feature (1)..(612): n is g, c, a or t
agcangttgtnggcggtgaggcggtgcacgaggtggaggtggtcatcaagcacaaccggttcacaaaggagacctatgacttcgacatcgccgtgctccggctcaagacccccatcaccttccgcatgaacgtggcgcctgcctgccctccccgagcgtgactngggccgaagtccacgctgatgacgcagaagacggggattgtgagcggcttcggggcgaacccacgagaaggggccggcaagtccaccaggctcaagatgctggaaggtgccctacgtggaccgcaacaagctgcaagttttcccaagcagctttaatcattaacccagaacaatgttcttgttgccgggttacgacaaccaagcaagganggatgcctgccaagggggaaaagccggggggcccgaacgtcaacccgnttcaaggacacctaatttcgtgaaagggaatcgtnagctggggaaaagggctttccntaaaaggggaaagtacgggattttaaaccaaggttaccgcnttccttaaagtggattganaggtccttgaaaaccaggggntttccaaagggccaanagccattcccngggggtcataaaagtcttttccctt

SEQ ID NO: 194 - DNA, 857 bp, Homo sapiens
cttatttaataataaaatttattagcagatctcttgtaagacagttgaagaattcatacattttccagccccaaaaaggccacacagaatcacaaacattcaacgtgttccacgataatgatatgtatgagatgctcttccttataaactttattacgaagcaaataaaataatacattcataatatatgaacaaagaaatcatacattaagaatcctgttgtgatttgctcttaagagcaaagagctgcagaatctctaatataaaaaagaggacattttcaatgtgtccattttcctaagaaacgtgtgtatgaaatgcctccaagtttctcatactatatatacttgctttaaagaaggaaattatttctcatttcattttccaaatgagaaacattgcctaaattcatgacatccctaggattattcttagtctcaacttccacacagagatgtctgaaatagaaaactcttaagtatcagaattcagggatataagctttcacattcaaaagtgcagagaatcccaacattaacaaacaatggttccacaaaaatcaaaattacaacttagacatctctaaaataatagtaatgtcactttagagtttacaaactacagaaataacttgattgtgacacatggcgagatatagaatatttcaagtggctccaaataccccataggaaaatgtggttccctttgggcaaatattaggtccccgggggaaggattataaagggttacgccagagactctcgtattgaccaagtaaaattttttaccctccaggtgggcttcctaaattaccatgaggtcccaccctcaccggagtaatgagaataaaaatatat

SEQ ID NO: 195 - DNA, 449 bp, Homo sapiens
  misc_feature (1)..(449): n is g, c, a or t
gggaatgtcacacacattgatcaggcactccaggaagctcatcgggtgctgaaaccaggaggacggtttctctgtctggaatttagccaagtgaacaatcccctcatatccaggctttatgatctatatagcttccaggtcatccctgtcctgggagaggtcatcgctggagactggaagtcctatcagtaccttntagagagtatccgaagttttccgtctcaggaagagttcaaggacatgatagaagatgcaggctttcacaaggtgacttacgaaagtctaacatcaggcattgtggccattcattctggcttcaaactttaattccnttcctatcatggagcatgaaccagtcatatcctgtttgaaagcctgggaactganaggatnaatctgggcaaattgagacagnagcagagcattcttcctttttaaggnatacgtgg

SEQ ID NO: 196 - DNA, 362 bp, Homo sapiens
  misc_feature (1)..(362): n is g, c, a or t
tcgtttactggttcagcacacaattctcatgatcattaatactctgacttgggcctagacttcgtcctaggctgaaaggttgattcaggtacaattaaattttctggttaaaaattgtcactgggttcaaatgatctatcatccctctagaaggcagcaccagcagagaagctataaatacactcacttcaaaactgaggctttaggggtgggttgtaccttaaccacacaccctacagccaagaggaaattaggcaggttgaggcaaaggatacaggaccaaatgcctctggggagatggggactnaaggcagctcccaagggaaggctgttaaaaaaggtggaccagggattttgtttct

SEQ ID NO: 197 - DNA, 488 bp, Homo sapiens
acaaaggtttgtttccagaagaacttttgatgtcagtaaatcttcacaatcccacctgtacattttaacattcatggacttgtaatggtgatgctttggctaacagcctagtagatgtattttatttcaattttatgatactacagtttcaaagtaattattcagaactctgaatataaaatagccctaaaccttaaaggacaaatcaaatttgaaataagaatttaaatctttggacaagctgttagggcttagtgactcctcttctactttgagcttttaaaatactgactattcataatgaaggaaaatagcaaccaactcttttagacacaataaacatggttagaagttctggcctatgacttgaaacaaataaccctgagcatacatttttgaaaaacattgtcagattcattgctgtaagtatgaagagttaataatctggaagggaattatggaattaagctgaacccatgcctgcatat

SEQ ID NO: 198 - DNA, 669 bp, Homo sapiens
  misc_feature (1)..(669): n is g, c, a or t
ttttttttttaagcagcaaatggcagacatttctttctctacattaaaactgattttcaacatgaaaagcagatttaaaagggaacatttagggtaaccacacttaatgcattcttgatccagtgactatctcaaaacaggaaaagatttttaagtaagttgaccatttggaaaccacttggtatgtcaaggtcatctcgtagaaaagcccaagttcttatgatctctgaagagctctcaaaagcagtcacagtcccaggaggctggtcctctaagaatcattttgggactcttcggagttcattcatcagccaaagagcaccagtgagcaaagccaaggagcctgactggtgagtggcggccagaggagttgggacatacatcagcagcgtgctgatgcccaagcccacctgtgtatacgccaaagccagcagagtcactgctgccatcttggtccttctaggaaggggaattctccgagagaggaagtagagcactgtaatggcagtgactgaagtgattcccagaatccggtgatcaaactgcaccatggtgggattctcaaaaacattcctcangatgggggagaaggtaaagaggtcctccgggatccaggattctcccatttttgggaaaggagttataaacaagcccagcatttagccctgc

SEQ ID NO: 199 - DNA, 594 bp, Homo sapiens
ttttttttttttcagttcaaactcatttcccttttattaaagtccaagttaccattacatggcttggtactcaataaaggaaaacttgttcaaataaggtaatatgttatcatcagtatttccaggtaactgttcacactcaagtagcaatgtcaataaatccttggggaagcccatccatgcggtttacactttgtcaaggcccagttcctccggagtggagattcccagttcatttaaagttggtctaagttcctggatgacataggggtagatttccttatgaggtcctgctttgtccttaacaacctctaggatacgaactgtactagcaaaatcatttaaccgtctgcatgcccgcaaagcagcatcaatgattttgggctctggaaccatatcataggtaacaagtgtgtttatccctttacgcaattcccaggcatctatatctggcttgttgaagtatgttacccagcgagcatcaaactcctcatctgtctcctgtgacccatgggaatagcagcgaactgactggatagccacggcgcggcggggggtccgggcggagtgcaggaggcctcgagggtcggcccg

SEQ ID NO: 200 - DNA, 369 bp, Homo sapiens
atggcatctggaggtggtgttcccactgatgaagagcaggcgactgggttggagagggagatcatgctggctgcaaagaagggactggacccatacaatgtactggccccaaagggagcttcaggcaccagggaagaccctaatttagtcccctccatctccaacaagagaatagtaggctgcatctgtgaagaggacaataccagcgtcgtctggttttggctgcacaaaggcgaggcccagcgatgcccccgctgtggagcccattacaagctggtgccccagcagctggcacactgagcacctgcactaaattactcaaaatgtgctgtaaagtttcttctttccagtaaagactagccattgcat

SEQ ID NO: 201 - DNA, 370 bp, Homo sapiens
ttttttatgggagaaggtatgccaatgcaatggctagtctttactggaaagaagaaactttacagcacattttgagtaatttagtgcaggtgctcagtgtgccagctgctggggcaccagcttgtaatgggctccacagcgggggcatcgctgggcctcgcctttgtgcagccaaaaccagacgacgctggtattgtcctcttcacctaaaagggaaaaaaggtggtttatggtcatccaacctagaaagggagactttcaacatgaatttcttttcctcagacatctctgatacacaagtaagactatggttgatatctaagagatcagttcaagccctcctcccattcttcagatgaagaaattgagg

SEQ ID NO: 202 - DNA, 547 bp, Homo sapiens
tttttttttttttttttttttaagtttaagttatttatttaagccatctcctgccacaagcaaagggatgggagaccagtataccagtcatcatttgatacaagtaaagaaggtgagcttaaggtcccatatactttttctggtccatgtgcagagtaacggtccaaaccagtgctgtggtccctggtgcccgggtagtggtccagattctctttattcatcttcgtagccagttggaagtggattcacatgagggttatggaatagagtatggttaccatctccccagggaaacggcttggtcctgatgcggagatgggggtaggcgatgaactcgggtctctcgtgctctccgtggtgcgacttcaggtacacattcagcatgctgactgccaccccggggagcgcgacgaagaaggtgagagtcttccacatgcgagctgagccctcttcgccatgggcgccactcgacataggccgccccagctgtgggcgggaccgacccagcagccgagaaaccgaggacacaccaactaccgccattttt

SEQ ID NO: 203 - DNA, 315 bp, Homo sapiens
ttgaagcttcacacctttattgtgtccgggggcgtccggggcctcaggggtgttcgtagcccgtgggcagagggttcacgtggctattgtggaacagagtgtggttgccgtccccccaggggtagggcttggtgcggatcggaggtgttggtagggacggaactcggggcgcgggcggtggccgagtggagataggagttgaaggtgcagagggccacgctgggcagcgcagcacgaaggtcagcagacgccaggtacgagctcctgctcctccgtggcctcctttggcagcgctggccaagccccgggtcaggg

SEQ ID NO: 204 - DNA, 449 bp, Homo sapiens
ttttttttttcacttttccaatgagtttttattagcaggtaagtcatgatttaggatcctggggtggggatcactgggtaccaggtcccccttcaccatcctgggagaaggatggaggacagaggaaagggagatgcagccagttcagatcttcccgggaaacgtgccttcagcccgttgctcatcccagtctgtgacccaggatgtggggcagagggactggtacacacgctggtaccattcgcacacagagatatcgcctcctttagcggtcattgccttctgacagcggtggaagtccaggtagttctgccagcagtttctagtctggttctggttggggaagcggctgtcaaaaggggcggtcttgtagttcttgattttggtctccatgtcttccgccatggtgctgaatcctaaaggcaccccggattcaacctgcagctcaa

SEQ ID NO: 205 - DNA, 363 bp, Homo sapiens
gcgtcgaccgcgtgtccttgggcggagaagggaggtgactccggcggaagaggacaaggcagaatgcaggcccttcgggtgtcccaggcgctgatccgctccttcagctccaccgcccggaaccgctttcagaaccgagtgcgcgagaaacagaagctcttccaggaggacaatgacatcccgttgtacctgaagggcggcatcgttgacaacatcctgtaccgagtgacaatgacgctgtgtctgggcggcactgtctacagcttgtactcccttggctgggcctccttccccaggaattaagaccaagaagcctggggggcctgagagacttgaacaagtgtcagtgaacgctgggctctg

SEQ ID NO: 206 - DNA, 421 bp, Homo sapiens
catggtaaagactgctttattggtggcagttactacaagtcaataaatattgatccccaaagaagagctcggttatttatcagattactggtccatagagagctgaatgaaactgaaccaagcgattgctgggatgactgaagtcactcctgcttcttgggaaatgaagccacagccagctcatatatggcatatgctgttccaccaactgtaagaatcatggtggctctatacaggagggcatcagctaccccaccctttagatacagtggaatttcatcatcctcctggaacagtttttgcttctccggaactttatttttaaaatgcctgcgggaagcagtgcttatcgtcctctgcccaatctgacgaagagccagcagattccgcagcatcttggctgttactgaccagcaaccgc

SEQ ID NO: 207 - DNA, 492 bp, Homo sapiens
ttttttgcagcatagcaaggagtctttactaggatggaggcaggggatgcgggggcaggtccagagcaagtagaatgggccatcattagaatgagcaaaactcctgggaatcttgagtcatcagctggcgatggggagttaatgcttggtgtggatgacaggtgtggggatgcggatatcctggcctctctccagacgccgttcacaatcaatcaaatagtttactccatcgatgaccagttgcaccagctccacctctgatttgcctagtcggtccaaattagaaatatcaaagacaccgcctgtagcagcagtgtccactcctccagtaccacgtttttggagtcttaggttctccaggatctttgggaagcggctatctttgcttagcaggggcagtttgatgtgcactcctgcccgaagtccagtgcccaggttagatggacaggtcaagatgtatcccaaacgctcattccacatgaactcccagcc

SEQ ID NO: 208 - DNA, 423 bp, Homo sapiens
ccggcttcaaggtcgacactcatccaagaggaaggatggccagtatcttttctaagttgctaactggccgcaatgcttctctgctgtttgctaccatgggcaccagtgtcctgaccaccgggtacctgctgaaccggcagaaagtgtgtgccgaggtccgggagcagcctaggctatttcctccaagcgcagactacccagacctgcgcaaacaacaactgcatggccgagtgcctcacccccgccatttatgccaagcttcgcaacaaggtgacacccaacggctacacgctggaccagtgcatccagactggagtggacaaccctggccaccccttcataaagactgtgggcatggtggctggtgacgaggagtcctatgaggtgtttgctgacctttttgaccccgtcatcaaactaaga

SEQ ID NO: 209 - DNA, 550 bp, Homo sapiens
  misc_feature (1)..(550): n is g, c, a or t
ttatattaaggagagttttattgtaaagataggcaggatctacaattttatatttttccaagtgtatataaactctcagagtagagatttatgtctgtcgtaccagcagacagattatttataaattgggaaagggaaagtttactttttgccaaactgaggcagagggggtggcacttaatatcttggcctctctccaacttcttttcacaatccaccaggtaattgactccatcgatgactatctgaacaagctcaacctctgatcgaccaattctatctatgttggaaatgtcgtacacatctgcgaccgcggcagtgtccacaccacctgttccacgcttctggagtcttaggttttccaggatcttagaaaagcgtgggtccttgctgagctttgggatcctaacgtggacaccagctcgtagtcctgttccaaggttcgaaggaccaggtcaaatgtatcctaggcgctcattccacatgagctcccaggctcgttcttgggattaacgttctactncttttaggtcacgacagaatcgctcaa

SEQ ID NO: 210 - DNA, 257 bp, Homo sapiens
tcttaaatagaaggtgagtttatttctccagtcttgaaattaacaattttcaagaaaacaaattattagaataactggtggagtcacagacatatttctagctccattaggtcaaaggaaaggaaagaggacaagggtagaaaggagacaagccctctaagaaactgtccattcagtctgtctgcagtcaatatgaagagatagcctttggagctacagaaaatattacattgaagtggattatgcttgctgttaaa

SEQ ID NO: 211 - DNA, 434 bp, Homo sapiens
tctgggacagtgcccacacccttagtggtggggctgggggctgcgtgtgaggtggcacagcaagagatggagtatgaccacaagcgaatctcaaagttgtcagagcggctgatacagaatataatgaagagccttccagatgtgtgatgaatggggaccctaagcaccattatcccggctgtatcaacctctcctttgcatatgtggaaggggaaagtctgctgatggcactgaaggacgttgccttatcctcagggagtgcctgcacctctgcatccctggagccctcttatgtgcttagagcaattggcactgatgaggatttagcgcactcttctatcaggtttggaattggccgcttcactacagaggaggaagtggactacacagtggagaaatgcattcagcatttgaagcgtcttcgagaaatgagc

SEQ ID NO: 212 - DNA, 475 bp, Homo sapiens
  misc_feature (1)..(500): N IS G, A, C, OR T
cacaaccacagcaagagcacctggctgatcctgcaccacaaggtgtacgatttgaccaaatttcnggaagagcatcctggnngggaagaagttttaagggaacaagctggaggtgacgctactgagaactttgaggatgtcgggcactctacagatgccagggaaatgtccaaaacattcatcattggggagctccatccagatgacagaccaaagttaaacaagcctccggaaactcttatcactactattgattctagttccagttggtggaccaactgggtgatccctgccatctctgcagtgggccgtcgccttggatgtatcgcctataacatgggcagagggactgaaacacctcctcagnaagttcagncgcaaggaagnagcctggttttgggacacggggaganaaggaggccnttgttaantatttttcaantggaccagaaacnttcattttgaaaacaattnt

SEQ ID NO: 213 - DNA, 352 bp, Homo sapiens
ccaaatatatttttaaaagatcatgcttataataagtaaattacacattaaggaaacatcaaaataaagtagatgaataaaaaggcacactcgaaaaatttgagcgcagaaaggacagttctttttgttttgtttctaatgtcggaagaaaaagaaagagatatattaaaatcattgttttcaagtgaaggtttctgtcagttgaagtagttagcaatggcttcttttctcccgtgtccaaagcaggctcttcctgcgctgacttctgaggagggtgttcagtcctctgccatgtatagggcgatacatcaagggcgacggccactgcaggaggatgggcaggggatcaccc

SEQ ID NO: 214 - DNA, 517 bp, Homo sapiens
ttttttaagtttaagttatttatttaagccatctcctgccacaagcaaagggatgggagaccagtataccagtcatcatttgatacaagtaaagaaggtgagcttaaggtcccatatactttttctggtccatgtgcagagtaacggtccaaaccagtgctgtggtccctggtgcccgggtagtggtccagattctctttattcatcttcgtagccagttggaagtggattcacatgagggttatggaatagagtatggttaccatctccccagggaaacggcttggtcctgatgcggagatgggggtaggcgatgaactcgggtctctcgtgctctccgtggtgcgacttcaggtacacattcagcatgctgactgccaccccggggaacgccacgaagaaagtgagagtcttccacatgcgagctgagccctcttcgccatggggccactcgaaataggcccgcccaactgttggcgggaccgaccagcaaccgggaaaccaggacctagcaact

SEQ ID NO: 215 - DNA, 491 bp, Homo sapiens
gttggtgtgtcctcggtttctcggctgctgggtcggtcccgcccacagctggggcggcctatgtcgagtggcgcccatggcgaagagggctcagctcgcatgtggaagactctcaccttcttcgtcgcgctccccggggtggcagtcagcatgctgaatgtgtacctgaagtcgcaccacggagagcacgagagacccgagttcatcgcctacccccatctccgcatcaggaccaagccgtttccctggggagatggtaaccatactctattccataaccctcatgtgaatccacttccaactggctacgaagatgaataaagagaatctggaccactacccgggcaccagggaccacagcactggtttggaccgttactctgcacatggaccagaaaaagtatatgggaccttaagctcaccttctttacttgtatcaaatgatgactggtatactggtctccatccctttgcttgtggcaggagatggc

SEQ ID NO: 216 - DNA, 295 bp, Homo sapiens
aggcctcctgcactccgcccggaccccctggcctcgcgtggctatccagtcagttcgctgctattcccatgggtcacaggagacagatgaggagtttgatgctcgctgggtaacatacttcaacaagccagatatagatgcctgggaattgcgtaaagggataaacacacttgttacctatgataaggttccagagccccaaatcattgatgctgctttgcgggcatgcagacggttaaatgattttgccagtacagttcgtattctagaagttgttaaggacaaagcaggacct

SEQ ID NO: 217 - DNA, 547 bp, Homo sapiens
ttttttttttcagttcaaactcatttcccttttattaaagtccaagttaccattacatggcttggtactcaataaaggaaaacttgttcaaataaggtaatatgttatcatcagtatttccaggtaactgttcacactcaagtagcaatgtcaataaatccttggggaagcccatccatgcggtttacactttgtcaaggcccagttcctccggagtggagattcccagttcatttaaagttggtctaagttcctggatgacataggggtagatttccttatgaggtcctgctttgtccttaacaacctctaggatacgaactgtactagcaaaatcatttaaccgtctgcatgcccgcaaagcagcatcaatgattttgggctctggaaccatatcataggtaacaagtgtgtttatccctttacgcaattcccaggcatctatatctggcttgttgaagtatgttacccagcgagcatcaaactcctcatctgtctcctgtgacccatgggaatagcagcgaactgactggataggcacggcggg

SEQ ID NO: 218 - DNA, 214 bp, Homo sapiens
  misc_feature (1)..(215): N IS G, C, A OR T
ccaatcgagtttttattagcaggtaagtcatgatttaggatcctggggtggggatcactgggtaccaggtcccccttcaccatcctgggagaaggatggaggacagaggaaagggagatgcagccagttcagatcttcccgggaaacgtgccttcagcccgttgctcatcccagtctgtgacccaggatntggggcaaanggnctngtanacac

SEQ ID NO: 219 - DNA, 434 bp, Homo sapiens
  misc_feature (1)..(568): N IS G, C, A OR T
tgctttaggattcagcaccatggcggaagacatggagaccaaaatcaagaactacaagaccgccccttttgacagccgcttccccaaccagaaccagactagaaactgctggcagaactacctggacttccaccgctgtcagaaggcaatgaccgctaaaggaggcgatatctctgtgtgcgaatggtaccagcgtgtgtaccagtccctctgccccacatcctgggtcacagactgggatgagcaacgggctgaaggcacgtttcccgggaagatctgaactggctgcatctccctttcctctgtcctccatccttctcccaggatggtgaagggggacctggtacccagtgatccccaccccaggatcctaaatcatgacttacctgctaataaaaactcattggaaaaaaaaagaaaaaanaagaaaaaat

SEQ ID NO: 220 - DNA, 437 bp, Homo sapiens
tccaatgagtttttattagcaggtaagtcatgatttaggatcctggggtggggatcactgggtaccaggtcccccttcaccatcctgggagaaggatggaggacagaggaaagggagatgcagccagttcagatcttcccgggaaacgtgccttcagcccgttgctcatcccagtctgtgacccaggatgtggggcagagggactggtacacacgctggtaccattcgcacacagagatatcgcctcctttagcggtcattgccttctgacagcggtggaagtccaggtagttctgccagcagtttctagtctggttctggttggggaagcggctgtcaaaaggggcggtcttgtagttcttgattttggtctccatgtcttccgccatggtgctgaatcctaaaggcaccccggattcaacctgcagctcaatgtg

SEQ ID NO: 221 - DNA, 390 bp, Homo sapiens
tttatttgttaattgtttatttatcaagaggaactatttcttagcccacatattcatgtgtcatagttcaggaacacaagtcagtgacaaacttctaggtaattcaacctgaagaaattctttatattccaagattactttacactctgaaagataccagccttcctcatctcctcaaaatctttcatgacatcatagtttctgtagaaatctgcgtatgccttctttctttgatcagccacacgaaacttatacaaagctgcaacccccagggatagcacgaatgctacagccatatgatttcgcagacgcctggccagaaggcagcgcatccgaggttttggcaaaacttcgggagccatggtagttactgtccttgatacgtatgcc

SEQ ID NO: 222 - DNA, 402 bp, Homo sapiens
ggacgttggtgttgaggttggcatacgtatcaaggacagtaactaccatggctcccgaagttttgccaaaacctcggatgcgtggccttctggcaggcgtctgcgaaatcatatggctgtagcattcgtgctatccctgggggttgcagctttgtataagtttcgtgtggctgatcaaagaaagaaggcatacgcagatttctacagaaactatgatgtcatgaaagattttgaggagatgaggaaggctggtatctttcagagtgtaaagtaatcttggaatataaagaatttcttcaggttgaattacctagaagtttgtcactgacttgtgttcctgaactatgacacatgaatatgtgggctaagaaatagttcctcttgataaataaacaattaaca

SEQ ID NO: 223 - DNA, 341 bp, Homo sapiens
ttttttttttcagaggccagcgtttattgacacttgttcaagtctctcaggccccccaggcttcttggtcttaattcctggggaaggaggcccagccaagggagtacaagctgtagacggtgccgcccagacacagcgtcattgtcactcggtacaggatgttgtcaacgatgccgcccttcaggtacaacgggatgtcattgtcctcctggaagagcttctgtttctcgcgcactcggttctgaaagcggttccgggcggtggagctgaaggagcggatcagcgcctgggacacccgaagtcctgcattctgccttgtcctcttccgccggagtcacctc

SEQ ID NO: 224 - DNA, 328 bp, Homo sapiens
atggtaaagactgctttattggtggcagttactacaagtcaataaatattgatccccaaagaagagctcggttatttatcagattactggtccatagagagctgaatgaaactgaaccaagcgattgctgggatgactgaagtcactcctgcttcttgggaaatgaagccacagccagctcatatatggcatatgctgttccaccaactgtaagaatcatggtggctctatacaggagggcatcagctaccccaccctttagatacagtggaatttcatcatcctcctggaacagtttttgcttctccggaactttatttttaaaatg

SEQ ID NO: 225 - DNA, 446 bp, Homo sapiens
cagctcacttcaagggtacctgaagcgaattggcaccaaagcagcagctgtattgccgcagttctagcttcaccttcacgatgtttcccttggtcaaaagcgcactaaatcgtctccaagttcgaagcattcagcaaacaatggcaaggcagagcacccagaaacgtacacctgattttcatgacaaatacggtaatgctgtattagctagtggagccactttctgtattgttacatggacatatgtagcaacacaagtcggaatagaatggaacctgtcccctgttggcagagttaccccaaaggaatggaggaatcagtaatcatcccagctggtgtaataatgaattgtttaaaaaacagctcataattgatgccaaattaaagcactgtgtacccattaagatatggcattattgaaggaataaagtacatgtgaaaccttc

SEQ ID NO: 226 - DNA, 363 bp, Homo sapiens
tttttttttttttttttttttatttttcacgtcataagtttattgacaaacatatctagtatggcatatgagttctagtttgatccacttccagaggctgcacctcttaaaatgctcttcatatctgttaaatggaggaactgaaacatccttatgttttaagcagttggtgtcttactacaaggaagggtgtagcaaatgcagatccaaagtacaaacacatcttagctagtaacgaccacttgttttccactgaaaatggcaaattcttcccagggccctcctcatagtggctcctacggaccacagaggttgtgaacctccggatgctctggcccaacataccgctgctggaagctctgc

SEQ ID NO: 227 - DNA, 374 bp, Homo sapiens
aaagtttaaatagattttattgttacaagggggacccaccaagcagggtcagtgacaccaaggaggtcacatggagacatcaagaggtcatgattgcagaagaggtgactggaattgaatgacatgatccaggggaggccggccacaaatgcagtaacatgaccaggatgggccggtggggctggtcaggtcacagtgtgagggacagaacggaccccttcactctggcctcctgtaggtctccaggtgtgacaggatccagcccgctgcaaggaggaaggtcacgaagcaggaggtaagcccaacggccaattccatgatcccaagcttcccctccggcggcaacgaatggatcttggcgcgcggcactgggc

SEQ ID NO: 228 - DNA, 452 bp, Homo sapiens
  misc_feature (1)..(466): N IS G, C, A OR T
gggctaaccagccacagagctcacattcctgtcccttgggtgaaaaatacatgtccatcctgatatctcctgaattcagaaattagcctccacatgtgcaatggctttaagagccagaagcagggttctgggaattttgcaagttatcctgtggccaggtgtggtctcggttaccaaatatggttacctgcagctttttagtcctttgtgctcccacgggtctgcagagtcccatctgcccaaaggtcttgaagcttgacaggatgttttcattactcagtctcccaggggcactgctggtccgtagggattcattggtcggggtggggagagttaaacaacatttaaacagagttcttttcaaaaatgtcttaaagggatttttagggtaggtaacctnccattcactgtttgcacnttatcttgaaatctttccnttttgggtgncccca

SEQ ID NO: 229 - DNA, 323 bp, Homo sapiens
  misc_feature (1)..(333): N IS G, C, A OR T
nntnnnnaccattttattgtggaaggaaaagagaatcaatganttgtacaaatgtgaaggctgtaacaagttgtagaggctttttccagacattcctatgcaatgttctccacagtaaatacctgggggcagccaagagggaagntttcagataagtgcaaacagtgattggatgttatctacctacaatccctttagacatttttgagagaactctgtttaaatgttgtttaactctcccaccccgaccaatgaatccctacgggnccaggcagtgcccgggggaggactgaggtantggaaaacatccngttcaaggcttt

SEQ ID NO: 230 - DNA, 571 bp, Homo sapiens
ttttttttttttttttaaaaggggtaaacagtgataccatttactgaattggagttactattaaaattcaaaaactgaacatattcatttaaccacaagccagtcttagttttaaatcaggactgcccaacaaaatattctgtcagtcattcatgatctgaattctggtgtatgagatctattaaaggatggtacacataaaaaagtcatgagacatttctgttttgtaataaataaggcagtggccaattattactcattagtagcttttttgagataagctattaagtctgccctttcttccttcttcttaatgccgacaaagatcatttttgttccagggatgtacttcttgggattctccaaatactccatcagtgtatcctctccccagatgatgcctttgttcttattggcggctgtgtaagagtatccaggggcctgacctgtcttccgcccaaagagaccatggagatttggcccagtcttgtgcttgcctcccttttcaacggtgtggcactgggaacactccattataaaaattcttcttgcctttctcaacatcacccat

SEQ ID NO: 231 - DNA, 353 bp, Homo sapiens
  misc_feature (1)..(355): N IS G, C, A OR T
cggggctaagggatggaaagacttttnttgagagaacgantggntctaatggattaaatcttaaaagcttctnggngttttccacaaaggggtcttgtggattgttgagagagtcgatgctcactccaaatgatgtgctagtgatcacatccatgctgtaggccccaaagacgtntttcaaggtgacaggcttgccttctncctgcttcccgcctcagatttctcaccaacacatctccatactggggcaatgataggggaccatctccntgagttttccgctgggtgaatnttgggagacagcaatgatcggnattcccctncccattcttccccgggncccaattcttggg

SEQ ID NO: 232 - DNA, 438 bp, Homo sapiens
  misc_feature (1)..(555): N IS G, C, A OR T
naagaatggaagagaatacgatcattgctgtctccaacattcaccagcggaaaactcaaggagatggtccctatcattgcccagtatggagatgtgttggtgagaaatctgaggcgggaagcagagacaggcaagcctgtcaccttgaaacacgtctttggggcctacagcatggatgtgatcactagcacatcatttggagtgagcatcgactctctcaacaatccacaagacccctttgtggaaaacaccaagaagcttttaagatttaatccattagatccattcgttctctcaataaaagtctttccatcccttagccccgaaaaaaaaaaaaaaaaaaaaaaaanaaaaaaaaaggttnctttaatttagggcggccgnaggtttaattcccctttggtggggggttaattttggtttgggattggcctccgt

SEQ ID NO: 233 - DNA, 704 bp, Homo sapiens
  misc_feature (1)..(708): N IS G, C, A OR T
tcatggttcagctgtttattgtctccatggggtgggtgaagaggagtggcccagctgagctgaggaaggtgaccactgagaacccattcaacctgctgagcaggctgggcagaaaggagcaggacttgggacagacgactgaagatgcagagaccccatgggccccacccctgggccttcctcccatgtggctgcaggccatcctctctgatcactgctgggttgcttcctggttaaagggccagaaggtgaaggagatgggcttttcaggcatcagaatgaggttgaatgtggtgcccacatcgctgaggtgttggatttcaactctgaagttctccagcatattgatgaggaagatggtcatctctagctcagcgatccgccgtcccagacactgccgcacaccccagccaaagcccaagttccggaagtaggntgatggttcttgtctttgctcagccatcgggtntgggtcaaaattttccgggtcgaagaagaaaggtgggctctcggnccagagcatagatggccacttgcaccagtgtcttgggcagaatcatgtaatctcgaagaccaagtcatttacagatatctctgcagggcacgggaatgggggggaagcttaagtggctccttgatgctgctttgagaaaggggacaagctgtagcatcgcggccatggctccctggcctggtgccgggca

SEQ ID NO: 234 - DNA, 351 bp, Homo sapiens
  misc_feature (1)..(365): N IS G, C, A OR T
ggcacgagcagcaaccggggaaccgcgccaanagctccggcgctttctccatcgccaccctgcggacttcggggtgggcaagcgaggcatcgaggagcgcatccaggaggaggcgggcttcctcatcgacgccctccgggaactggcggcgcaattatcgatcccaccttcttcctgagccgcacagtcttccaatgtcattcagctccattgtcttttgggggaccgcttttgantattaaggacaaagagttccttgttcattgtttgcgcatgatgcttagggantttttccagttttaagttcaaacntttcaaggggggcagtttttntggagatgtttntttttt

SEQ ID NO: 235 - DNA, 384 bp, Homo sapiens
  misc_feature (1)..(444): N IS G, C, A OR T
ttttcagnaaataagagctgctattattactactcttcatagcataatgtaagggtttccttcctctcatcccagctcggaagcaccttatcaaggtgaactgagccccttctgtttcttctcttccctctagccaccacgccccttcctttcccgcatcttccccccattcttatacccgcctnttccgcgaaccccgccctgaccccgnctttccctggncccgccaccagacctgnaccggcanagcctngttcagggggcaggaagntcatggtgtagtttcgtgggntcgtggcaaagccacgntattttnggggacacgtcaatntccttagggtgactggggagggatttttagggcggaagtttttgcatnacggt

SEQ ID NO: 236 - DNA, 472 bp, Homo sapiens
gagaactgaaccagcaattaataacactttttatttagcacattcacaaaagaaatggatctaaattatcattcattaatcacttttctgtgttttacagtgataacatattaaaaagtcagcattagaaaagtattagcatatgcagcaattaatacaagtgttacagagtatgaataattgcagatatatttgtgcagtgacctgaacaactctccttaatggagtttggatgcttatgggatattgagtgaatgggaatgatttgatgagaggtcagagaagacataatagtgggaatgtccttgataaaaaaagagttgcaggtgatagcagatcggcagccagatgggctagcattcttcagacagggatgaagcagatctgggtatgaagggtggcagagaaacaatccctttggtaactgcagtagtattgaggttccttaaatcatcaacagatttcaggttaa

SEQ ID NO: 237 - DNA, 360 bp, Homo sapiens
  misc_feature (1)..(444): N IS G, C, A OR T
nntnattagggagaaagtaaaagaacaccaagcatcactggatgttaanaatcctcgggactttatcgattgcttcctgatcaaaatggagcaggaaaaggacaaccaaaagtcagaattcaatattgaaaacttggttggcactgtagctgatctatttgttgctggaacagagacaacaagcaccactctgagatatggactcctgctcctgctgaagcacccagaggtcacagctaaagtccaggaagagattgatcatgtaattggcagacacaggagcccctgcatgcaggataggagccacatgccttacactggtgctgtagtgcacgagatnccagngatacagtgaccttt

SEQ ID NO: 238 - DNA, 399 bp, Homo sapiens
  misc_feature (1)..(400): N IS G, C, A OR T
agcaaataataatgcttttnattnagaacatgcagaaaagaaatgcctttgaattataatacacaaatcatattncnctattnaataatancatattaataactcaacattagataagtatgagcattatgtgacagtcaatgcaactgttacagagtatggagaatagcagatatatttccacagtgaaacatagggaaactctccgtaatggagggtcgaatgttcactagancttcagggaaggggaaaatgtgaggatgacagggtgaggaaaagggcattacagataggtgaaaggatgggntaatgcccccgggggaaagggagctgcnggggacttnaccagcngcagcccggggccatctgctcctttcttccggacnggggntgaaggca

SEQ ID NO: 239 - DNA, 536 bp, Homo sapiens
  misc_feature (1)..(536): N IS G, C, A OR T
tggatgaaggtggcaattttaagaaaagtaaatacttcatgcctttctcagcaggaaaacggatttgtgtgggagaagccctggccggcatggagctgtttttattcctgacctccattttacagaactttaacctgaaatctctggttgacccaaagaaccttgacaccactccagttgtcaatggattcctctgtgccgcccttctaccagctgtgcttcattcctgtctgaagaagagcagatggcctggctgctgctgtgcntnccctgcagctctctttcctctggggcattatccatctttcactatctgtaatgccttttctcacctgtcatctcacattttcccttccctgaagatctagtgaacattcgacctccattaagggagagtttccnatgttttcactgtgncaaatattntctgctattnttccataatntgttaacagttggcattgactgtcacataatggttcatatttattntaatggtgnaggttattaatanggttattattaaatagggggtt

SEQ ID NO: 240 - DNA, 312 bp, Homo sapiens
  misc_feature (1)..(312): N IS G, C, A OR T
ttttttcaggacaagtgaccacaggggcctttttattctaccctgcaggaccctattccagggcgacaactttcagagagctcagggcatgctcgagctgcctagggggcaggctgcaggagggaacttgactggactctgagatgctgggatcccgcttaatgactctgacagtctgcgcaggggccctggcagggganagaggaacagggacatgtgagactaggcaggaaggcaagggacaaaaccacagcacccttgcatggccacacgaggagcctggagccagcactgggagggatgggggcaaac

SEQ ID NO: 241 - DNA, 391 bp, Homo sapiens
  misc_feature (1)..(400): N IS G, C, A OR T
ttgtggttttaattttaatttcccatataattaatggtgggcacatttgcatgtgcttactgggtcattcatatatcttttgtgaagcatctgctccaatcttttgcctgactttggagttttttggtttatggatttacaggagttatttattcaggatacaaaattgttaaatatatgtattcgaaatatcttcttccagtctgtggcttaccatttcattttcttaaaggtgtcttttgaggagcagacacttatattgatgcaattttcaggtttttcttctgtttgttgttttttgtgtcctctttaataaatctttgcctaccccaagggtcatgaaaatattgtttccntttaggnttatatttttaggcccttaacctccggg

SEQ ID NO: 242 - DNA, 405 bp, Homo sapiens
  misc_feature (1)..(406): N IS G, C, A OR T
ctgaacccgatacattataacatcaccagcatcgtgcctgaagccatgcctgctgccaccatgccagtcctgctcctcactggcctttttctcttggtgtggaattatgagggcacatcctcaataccaggtcctggctactgcatgggaattggaccccccatctcacgccacaacaaaattattttgagatagtaatagacccagaagtaaaggctaaaaatataaatctaaaaggaaacaatattttcatgaccttggggtaggcaaagatttattaaagaggacacaaaaaacaacaaacagaaggaaaaacctgaaaattgcntcattataagtgtctggntcctcaaaaggacaccttttaggaaaatggaattggttaggccacagangggaggaggt

SEQ ID NO: 243 - DNA, 543 bp, Homo sapiens
  misc_feature (1)..(600): N IS G, C, A OR T
taagtttttcttttttgagaggctcatgaaattcaaaagggaccactagctaatttcaaccatgcttcacaaaacaataatggctattttatattgcagttaccaatgtaatgcaattagtgctttaaaataatctacactcaaaaaaagagagagaaagagagagacctttggaggaaatatgcttattcaaaagcttcttggaaaagaaaatttacctgaatatcaagtcatgactgatctcaagtgtaatgtttaaaagcttcacagacatgaatattacaatcttcaggtctcaggacttttaatctgagaaagtttagagtttgggtttgttttttaaattcactttctaaccaaaacaaataatagaagtactccaatttttcactatttacaactctcagcctacnatccggaaatggacaccataccaggtcnccttaaactggcagcattnaaggggaggcacaccantcctctgctgcncgattggccatccnctggaacncccctggaaatattatgggtagtaaatggtcc

SEQ ID NO: 244 - DNA, 256 bp, Homo sapiens
  misc_feature (1)..(256): N IS G, C, A OR T
ggcgtggatggccaggccggacccagaaactccaggggctgatcccaggcgctcgctatgaggtgaccgtggtctcggtccgaggctttgaggagagtgagcctctcacaggcttcctcaccacggttcctgacggtcccacacagttgcgtgcactgaacttgaccgagggattcgccgtgctgcactggaagcccccccagaatcctgtagacacctatgacatccaggtcacagcncctggggccccgctctg

SEQ ID NO: 245 - DNA, 173 bp, Homo sapiens
acctagatatgtacatatttattacaatataaagacataaatgtatatttctgaaatattctaaaaatataatgtaggaagaaatatttatcaaatacacagaattatatacagtatgcatttaggacaagcagtagtaaaaatatgcacaaataaaccatctgtccacacaa

SEQ ID NO: 246 - DNA, 289 bp, Homo sapiens
  misc_feature (1)..(300): N IS G, C, A OR T
gtgctgggatccaaggcattctacagggttcactgctggtttacacttcacctgtgtcagcaccatcttcaggtgcttagaacggcctgggagcctgttctgtcttgcatcttccatgacatgaaagggaggctggcacttgtcagtcaggtagaggttacaaaccgtttcaggccctgcntaccacattcactgtttgaatctttaattcccaagaataagtttacanttcacaatgaatgacctacaacagcttaaattttctggggctgggagtaatactggncaa

SEQ ID NO: 247 - DNA, 437 bp, Homo sapiens
  misc_feature (1)..(437): N IS G, C, a or t
aagaaataaaagtccctttattttatattctacccaaggacagcaatgcgataaaggggtggccttttagctgagagggagttgctcaaaaatgatagaagtggcaaaagctcagggtgtgtgcaaggagttcctcccacctctcgagtctggcggcctccttctctccctcctcatctngagacatggcagcagccaggaaccactgtgccagagctggagcctctaggacaagccccagcaaggcggangactcagctcagcactgtctctgcaggaactgaggcccactttcttattngggaaccaggacaatgcgggccacactcttcaactcccccgtctccggggccaggaccacctttgtacttctggatcagccttgcgaggagtagctgcatctccagctctgcaatcctngcgggccaggangcccg

SEQ ID NO: 248 - DNA, 458 bp, Homo sapiens
gcaacgagcaacagtttatttataaaaaaagaaaaaaacaaacaactttttaacgacattttatagattaagtaaaaataccagtattaatatatatgtatatacatagtgcatatatatatatacatatgatataacattaacattacatgcttctcaggacagaagaattaggacatgttccctcctatcaatttaaaactcgatcacaatttaaaatcatggaagaaaacttgcttcctttattttctgcttttagacttcaagtacaggaagttatgaaaccaggatctaaatgtggaaaccatctgctatgcaccaattataagggactgccacaaatgatgagtcaggggtcttctgaattcttacataggtctctgtaaccctacaactgtgtcaaccttctacctgagatgagagggaatgatgaagcatgacagtgtgtaggtttcatg

SEQ ID NO: 249 - DNA, 568 bp, Homo sapiens
ttttttttttttccacattaaacattcaaacatttattgatctttttatcaaaatgtgaaggaatggcaagattaaaaagaaaggaaatcctttctcatttaagagtagaaatggagctctagtagtcaaaacgaccctcaagttaaaagagtccctaaattgttcaaaatcagctactgagatttggtaacagcaaaccacatggtctttcctctggtatatgattaggacagaaaccttcttgttgggccaatgactgcgcaggttttgatgacatgaggaatacaataagttggccattgtatgaaagggaggcagcaggacctgagcttgtgcccttgtcactttctgtatgaggccaggagggtggagcttgatgacatctcctaacaatacccacatgcacatatctgtcatccttaaatcactgagtcttggacttcagggactccttgtgccggtccacatgggaaccaacccactccaccgatttctgcttggcttcctcccagctgtagagtgattaatacgccagatcttactgagccttcttatacgagacggtga

SEQ ID NO: 250 - DNA, 374 bp, Homo sapiens
  misc_feature (1)..(374): n is g, c, a or t
atggccgcggcacnctnctttctaagtcggcttcgagcacccttcagttccatggccaagagcccactcgagggcgtttcctcctccagaggcctgcacgcggggcnggcccananggcttctccatcgaaggcaacattggcctgcactgcccaaagtcttggaaacttgctggatatgatgtaccgggagccagcacgatggtcctacacattccagacattttcctttttgagccgcctgaaagtacagctgggagcccttccctgaggaaactctttacagggccagggaagccagttacagatcttttgaggaggtctgtgtaacagtggacagggttccatttttgagggtttggatggaacatttcc

SEQ ID NO: 251 - DNA, 444 bp, Homo sapiens
  misc_feature (1)..(444): n is g, c, a or t
taanttaagtaaactttattttcaaaatgcttcaggtacaaaagaaaacaatggcaaagtctaacaataattaacaaaccagctcttgagcgggcagagtgctccagggatgagaggggctggggatggaaaggtggttgggagacacaacatttttctagcttcagaaagtcagggagcccagatcacagcctgaacatcatggtattggttacagattctttacaaaggtgtttacctctctcatgaggtcttcttgtttggttacttcctcagaaaaatcatcattgacatcccaacaccagcactgggaatgttcatcagagccctcaaagtgggagcctgtcactggtacacagacctctcaaagatctgtactggcttcctgggctgtaagggtttctcaggggagggctcccgctgtactttcaggcggctcaaaaa

SEQ ID NO: 252 - DNA, 584 bp, Homo sapiens
  misc_feature (1)..(584): n is g, c, a or t
aaaataaaaagaaccacctgtttaataacatataaatatcttgttaagaatgaatcagtgtgacctgggagagtttagaaattcttgagttagttacaacaacatagtgataggtttttcaaggtactttctaaactcagcaagccactgggctccaactgctccatccaccacccggtgatcacaactgagtgtaacagacatcatgctagccacatcaaaccctttttcattatctgcagggaccagtttatcctctgaagcaccaattgccaaaatacatgcttgaggtgggttaataatagcagagaaattcttaattccaaacattcctaaattggagatcgtaaaagtgccaccctggaattcatgtggctgtagtttaccctctcttgctttggttgctaaagaaacaacatcattagcaatggtttccactccttttatatgtgcattaaacacaataggtgtgatgagtcctgccagagtactgaccgcancactgacatcaacaacatgattntgtcttataactgtgtcatcccagaagatttgtttnggaacttttaacatgcaaagctgaa

SEQ ID NO: 253 - DNA, 497 bp, Homo sapiens
tgaaagaagagggtattgagtacaaagttgggaaattcccatttgctgctaacagcagagctaagacaaatgctgacacagatggcatggtgaagatccttgggcagaaatcgacagacagagtactgggagcacatattcttggaccaggtgctggagaaatggtaaatgaagctgctcttgctttggaatatggagcatcctgtgaagatatagctagagtctgtcatgcacatccgaccttatcagaagcttttagagaagcaaatcttgctgcgtcatttggcaaatcaatcaacttttgaattagaagattatagatttttttttctgaaatttccctgggagcctttgtagaagtcacattcctgaacaggatattctcacagctccaagaatttccaggacctgattattgaactttttggaggtatttaaaaggtttggccaaaaggaatacgccttaatcagaattttgcctaaattaggatttggtt

SEQ ID NO: 254 - DNA, 498 bp, Homo sapiens
ttacttacatcagttcggtttatagacatttgaatcatatctgaatgactgacttgtttccaatgtgaaaaccaaattaaaaataacttgatcactgtgcttcaaacacaactgttcacatatcaaattctagctccagccatgtaaaattcaacttttctgtatcagagaaaaaagctatttaaattcaggggcattgaatctttcatgaacagcatgaaaatatgagttgacggagatattccaggatgctacaataagtagctttttgtcttacatattagtgcactgaaacaaaatactaaatttatgtaaaatatagatataagagtattccattttgtccaaacctattaaataccttccaaaagtttcataattcagtcctagaaattcttggagctgtgagaatatcctgttcaggaatgtgacttctacaaaagctcccaggaatttccggaaaaaaaatattaatcttctaatcacagttggatgatt

SEQ ID NO: 255 - DNA, 496 bp, Homo sapiens
  misc_feature (1)..(496): n is g, c, a or t
cagttacatcaagtagctggtttatatttagattatctcaagtaggggggaataaccatgtgtaggaattcatagaaaaataaacaatcagctgaagaggtctaagaaaatgctgacttttaaaatttcacttattttccttgaagttttctacccttcccatcgatgataaaccaagatcatgtaatggaaaatttcaaaccagggctaaattctaaagtaaagcttcaattcaagcccttcccccaagagaattaattttcctgatttctctttctctcacatctaaggagaacattttaggcagttaaatttcagaacttcaaggtttcatcagggtcacctttatgtacttgtctttagggaaccacaattctacctatcgtacatttcctagaggaagtacttatcaccaaaggggctaggcaaggccacatacatggtcccntaattagggagtacagagctaaaaatcngggtgtccggattattaaat

SEQ ID NO: 256 - DNA, 447 bp, Homo sapiens
  misc_feature (1)..(447): n is g, c, a or t
gaaaaagggtttgatgtggctagcatgatgtctgttacactcagttgtgatcaccgggtggtggatggagcagttggagcccagtggcttgctgagtttagaaagtaccttgaaaaacctatcactatgttgttgtaactaactcaagaatttctaaactctcccaggtcacactgattcattcttaacaagatatttatatgttattaaacaggtggttctttttattttaaccagttatttttattattgagtctgtccagataagttatttataatgggcattactgaatttttaaaatgccgattacacccanatattgtgcacatttaataatcagacaccagatttttagctctgtactccnaattaaagggaccatgtatggtgggccttgcctaagccccttttggtggataaagtaccttcctcctaggnaaaatggt

SEQ ID NO: 257 - DNA, 402 bp, Homo sapiens
  misc_feature (1)..(402): n is g, c, a or t
gttttttttttccattttatttatttatttttttgagaacatctgccctttaatttgcatttaaaatcggtttctttaaatactttagttacaagttctgaatagtgaagacagagtagtagatgctgcaggcactcagtattggctcccaccccttcgcccctccccacccccaggcctcacttcttggctcaagatacaaaaaggcactctctactggccctagtgtcaaatgtcagcagcctcagagcctggatgcagttgngatacaaagccatgaantcccagntagctccaanggaattccaantgattgttgcccagtatccaccggggcaacacatctnntagaaatgacctcattcnncattacaccactatnnctactaacacccttcaggg

SEQ ID NO: 258 - DNA, 252 bp, Homo sapiens
tagtaagttgctgtacggcaattggttgagcaggatgttcctgtacgttcctgcgtcatagtctggccttgactcatcctcggcaggaaacagatcttgaggaccttgactgtggtatgaaagcaccctgagggtcttagtacatactggtgtaatggatgaggccatttccaacacgagttgaccgctggtctgggcacaatcggtggaattccttggaggaacgggattcatggactggtatcgacctgc

SEQ ID NO: 259 - DNA, 500 bp, Homo sapiens
agatgccatgcatccccaggatggcagactgacgggggttgataatgggtgttccaaagagcgagccaaaaacgcctccattgctaatggtgaaggtaccgccatccatatcttcaatggcaagttcattctttcgggccttctctcccagttcagtgatggtccgttcaatatctgcaaaattcatagcttccacattcctgatgactggaaccaccagaccccgtggggtggccactgcaacactgatgtcaatataatccctatacaccacctctttggttgtgtcgtcaatcactgcatttacaacaggctgttcctgcaaggcaaaggctgaggccttcacaaatgccgacatgaagcctagtttgaggttatgtttcttcaaaaaagcccctttgtgccgagccctcatctcctggatgttactcatgtcaatctcatttaaagttgtcacgcttgcacatgtattctggggcctcctcagacgctgtgcaatg

SEQ ID NO: 260 - DNA, 562 bp, Homo sapiens
  misc_feature (1)..(562): n is g, c, a or t
gattgaagctcttttggtacctgatgggggaaaagtcgaaggaggcactccacttttcacactcaggaaaactggtgctgctcctgctaaggccaagccggctgaagctcctgctgctgcagccccaaaagcagaacctacagcagcggcagttcctccccctgcagcacccatacccactcagatgccaccggtgccctcgccctcacaacctccttctggcaaacctgtgtctgcagtaaaaccactgttgcgcaccactagctgagccaggagctggcaaaggtctgcgttcagaacatcgggagaaaatgaacagggatgcggcagcatttgcacagcgtctgaaggaggcccagaatacatgtggcatgctgacaacttttactgagattgacatgagtagcatcccggagatgangggctcgccacaaggaggcttttttggaggaaacttaagctcaaactaaggctcatgtcggcaattgttgagggctcagccgtttggctggaggaaaacgcctttgttaatggagggaattgacgaccaacccaaagggtg

SEQ ID NO: 261 - DNA, 415 bp, Homo sapiens
ctcttgtttgaaaaagtcctaagtgtatgggaagtggctatggtgccctctcactctgcccctcccgtgtgcttgtgctctgcaggtatggatttaacagtcacgggctttcagtggtggaacacaggttacgggccagacagcagaagcaggccaagctcacagaaggtaaagtggggttgtgtcagtgggcctttcttatttattaggaggaaacgtgggagaaatgctgggaacatttctagtgaaataaacatgattgagcaatagcaaaaaccactgaggacctcaggacacctctcctagagcgattttcctggtcccacacagcttccaagagtttaactggattttgcaatttagcaaatactcactttgcctctgccttgttatgtaacctgttaccgtaactagg

SEQ ID NO: 262 - DNA, 433 bp, Homo sapiens
  misc_feature (1)..(433): n is g, c, a or t
nttgcccaggctggtcttgaactcctgagttcaagtgatcctcccaacttgggcacccaaagtattgagattacaggtgtgaactgtcccgaaccaaaaatgagtttccaaaacaactcatgaagaatattttcccaaatgctaatattagttagccttgagtagggaggagtatctgtttcttgaacattctttctttacgcttctctgtatttactaagtcttctataattaatgaacattatttacacaatggatgacaaaaaacgggaggacagagtgggccacgggaggatgacattcaagtcctgctcctgccctcattgcctgtgtgatcattgcccagccgctttgcttncgctttgctttcaggcctccctagttacggtaacaggttacataacaaggcagaggcaaagtgagtatttgctaa

SEQ ID NO: 263 - DNA, 414 bp, Homo sapiens
  misc_feature (1)..(414): n is g, c, a or t
acacctgcaaaagcgggcccaggatgctgtgatcatcctggggggannaggacttctcttcgcctcctacctgatggccacgggagatgagcgtttctatgctgaacacctgatgccgactcttgcaggggctgctggacccggagtcagcccacagactggctnannggntctcctncctggggctccttccacgggccagatttcaagactctgacatgctggaagtgagagttctgggccataaattccgaaatccagtannaattgctgcaggatttgacaagcatggggaagccgtggacggactttataagatgggctttggttttgttgagataggaagtgtgactccaaaacctcaggaaggaaaccctagacccagagtcttccgcctccctgangaccaagctg

SEQ ID NO: 264 - DNA, 596 bp, Homo sapiens
  misc_feature (1)..(596): n is g, c, a or t
ttaaacccaggttctaaatggctttattttttccatgactttttcctcctaatattcaatgtccttgcaagactgatggatcctagggtttgaatccacaaagaatcaaaaatgcagtttatggtctgaccaagggactgaagaaagcctgcggttgatcctggtgaccccccgattggcgtttacagtgcagccatgccatggtggngggacatggctcaagatggagtccctcctctcatgatccagccacaaaggcttgcctgangtccttgggaaggttccagatcaggcttcccgtcagacgctgtcctcacctccgatgatctgctccaatggcatctgtgactccgccaaagccctgctctttcagaagggcctccagttcccgcttgactttgcccacaacgggtggcccccagaaggtgagggccgtgtacagctgcaccagggaggcccctgcccggatcttctccagcgcgtcctgnccgctgcttcacaccaccaaccccaattatgggaactcggccttgggtgagtgcaacatctcccgaatggnttgagttgataatcccgngggctttcccattcagcct

SEQ ID NO: 265 - DNA, 167 bp, Homo sapiens
ggtgggcaaattgagctccgcacctacgtgatgcccaacgcacctgtggtatgaggccatcccactggagcgcttcctggtgcccatcgagagcattgagcgggcttcggggctgctctttgtgccaaacatcctggcgcgggcaggcagcctcaaggccatcacgg

SEQ ID NO: 266 - DNA, 411 bp, Homo sapiens
atgtgttagctcagctagatgctgttgtcagctttgctcacgtgtcaaatggagcacctgttccatatgtacgaccagccattttggagaaaggacaaggaagaattatattaaaagcatccaggcatgcttgtgttgaagttcaagatgaaattgcatttattcctaatgacgtatactttgaaaaagataaacagatgttccacatcattactggccccaatatgggaggtaaatcaacatatattcgacaaactggggtgatagtactcatggcccaaattgggtgttttgtgccatgtgagtcagcagaagtgtccattgtggactgcatcttagcccgagtaggggctgggtgacagtcaattgaaaggagtctccacgttcatggctgaaatgttggaaactgcc

SEQ ID NO: 267 - DNA, 439 bp, Homo sapiens
  misc_feature (1)..(439): n is g, c, a or t
ccacaaactacatgattttatttataaaattcagcacatcacttattattgcctatgtcaattgcaaacagtcctcagttacagctctcatttttcaaaataaaaatctttgaaaatgtcctcaaagtaaaatattactaaatatcttattaagttgatagcccatgggacatgacagttaacactatggaaaaagggttaatataaaacaatataaaactattacagacaatagcttatcaatattaccttcattccattactgggatttttcacgtagtaacttttattcgtgaaatgatttcatttacaaagctattattctttgctattacttcagcttttagctgttttaactttattgtgatgttttcttctgacatttcagtaaaggggcatttgtttcaccttgggacaggaactccnggaataatttttt

SEQ ID NO: 268 - DNA, 412 bp, Homo sapiens
acacaattacaaaagaaaaaataaaagccctaaaatcttgattatttttcctttttttggaccaaatactcattttcctctaagtttattgacctgtgaaactttttatacaataaaatctttcaagtgaaagattagggttaaaaagaaaaagatggatatcttaaagggtacagcgaatgtcagaacaaaggatgatgggaaaatggtttcagtcactgattatttcattatccttagattcactcgcccttcatccctccccaaccccaatctacacgatctttaagatcaagaaaaaggtttaaatattttaaaataattaaaaagaaataaaaattcacatttaaaaaggaacactcaagtcaggaaatattttcccatcatgccttttccgtgaacaggtgtctga

SEQ ID NO: 269 - DNA, 386 bp, Homo sapiens
cccttccctctctcccatttcaggaatttaaaattaagtagaacaaaaaacccagcgcacctgttagagtcgtcactctctattgtcatggggatcaattttcattaaacttgaagcagtcgtggctttggcagtgttttggttcagacacctgttcacagaaaaagcatgatgggaaaatatttcctgacttgagtgttcctttttaaatgtgaatttttatttctttttaattattttaaaatatttaaacctttttcttgatcttaaagatcgtgtagattggggttggggagggatgaagggcgagtgaatctaaggataatgaaataatcagtgactgaaaccattttcccatcatcctttgttctgagcattcgctgtac

SEQ ID NO: 270 - DNA, 435 bp, Homo sapiens
ttttttttttttttttttttttttttttttttttgaggtttagcatcagtctttaatgctgtcgcacttcattgactagtcacacactttggtctcatgttggcagtggcaatttacaatgagtctaaaggtctgagcactggactggcctccagggaacagacatttgttccaactccccttccctccccaagatttcttcagaattccattatggccctatacagagagcactggctgccggggacaggttttgagtgtacaccaactatacatggaattataaaaacatatttacagacgttccacagtgctcctgtaatcagaagcaaagacccttttatcaaaagggattgtatctagggctgtgcaaaattcaaaaggatcagatccctttgaaagagtccatagtccatgaaacaaaaaattacctgg

SEQ ID NO: 271 - DNA, 513 bp, Homo sapiens
gtcttctctttggccatctcaaattgagaacctaaactattcctgcagaactgcctggttggcgtccacaagcaatacctctcgttccagcaggaccaagggagccagcctccagtgagtgactccagcaagtgcagccacctctcccttgatggtctgggagcctggcctcagcaaggggccttcctgacctctggctccagtgaagctgaatgtcctcactttgtgggtcacactctttacatttctgtaaggcaatcttggcacacgtggggcttaccagtggcccaggtaattttttgtttcatggactatggactctttcaaagggatctgatccttttgaattttgcacagccctagatacaatcccttttgataaaagggtctttgcttctgattacaggagcactgtggaacgtctgtaaatatgtttttataattccatgtatagttggtgtacactcaaaacctgtccccggcagccagtgctctctgtatagggccataatg

SEQ ID NO: 272 - DNA, 579 bp, Homo sapiens
tttgtggttccaactgttttatactgaaatatgtctgagctgatccaaaaaagcgttgggttgggggagaaggaaatgatggaagtggggtgatctcagagctccatgttagcaactctgggagtgtgggccggtccatctgtctgtctgcccaccctggcaggacaatcaggcctaggaggtctggaggagctcgccgagctgggcggaggaggcaggccagtcccatgctggaggggaccccacggccccttctacagggcaggagagtcctcagctgaagggcttcaccagcttcatggcagcatagttcgggaaggcgtagatgaagatggccaggaacagcagcaggatgaagaagatgaagaagaaggttgatggcccaccggaaacgccgccacaggatgaacttcatggtcttgtatggggaggtaaaccacaggaaggaggtgtcggggcgccttgggtcctcaagcttagggttcatgttgggctcatcccggccctggccagcaggccgctcctcatgctcactctctgctacaatctccaaggtcatttccagcttgcccgccagta

SEQ ID NO: 273 - DNA, 602 bp, Homo sapiens
tttacttttttgtaacataactgcgtgctttattgagatacacagtaaagcagtactataatacaatagtaaggcatatatttggtgaagtctgatatgttgtgaaaatgcagtaaaactgaagtttaaaaaaataattcgtaaatgttacagtgttggtgttaaaacacaatatattatgatactcaagtaagaactcagtacctgaaaacaatgacaaaacatgccatgtgatgtttatgcttcagttacattatgatttacagtttaatacttggtggttataaagaacacaacacgaaataatgtccaaattaattatgcttaaaatgcagcaataaagctctcaatttttgttcaaatattatgacagactcactccagagctaatgtgtctaaaagaaaaacaaaaagattaaaacaaaattatttatgcactctatttacctctgattttagaatgaaacttacttacttaaacttcttagtaggatgtaaagtaaccccttgttttaaatctgagttttaaaaatccttgggtaaagaaaaggtccagcgtcacataaaggaaaaaaatgcaagacaaaaaccaaatcttcatg

SEQ ID NO: 274 - DNA, 455 bp, Homo sapiens
tgtccattattaataattaattaattaacatcaaacacggcttctcatgctatttctacctcactttggttttggggtgttcctgataattgtgcacacctgagttcacagcttcaccacttgtccattgcgttattttctttttcctttataattctttctttttccttcataattttcaaaagaaaacccaaagctctaaggtaacaaattaccaaattacatgaagatttggtttttgtcttgcatttttttcctttatgtgacgctggaccttttctttacccaaggatttttaaaactcagatttaaaacaaggggttactttacatcctactaagaagtttaagtaagtaagtttcattctaaaatcagaggtaaatagagtgcataaataattttgttttaatctttttgtttttcttttagacacattagctctggagtgagtctgt

SEQ ID NO: 275 - DNA, 555 bp, Homo sapiens
ttttgtaacataactgcgtgctttattgagatacacagtaaagcagtactataatacaatagtaaggcatatatttggtgaagtctgatatgttgtgaaaatgcagtaaaactgaagtttaaaaaaataattcgtaaatgttacagtgttggtgttaaaacacaatatattatgatactcaagtaagaactcagtacctgaaaacaatgacaaaacatgccatgtgatgtttatgcttcagttacattatgatttacagtttaatacttggtggttataaagaacacaacacgaaataatgtccaaattaattatgcttaaaatgcagcaataaagctctcaatttttgttcaaatattatgacagactcactccagagctaatgtgtctaaaagaaaaacaaaaagattaaaacaaaattatttatgcactctatttacctctgattttagaatgaaacttacttacttaaacttcttagtaggatgtaaagtaaccccttgttttaaatctgagttttaaaaatccatgggtaaagaaaagggtcagcgtcac

SEQ ID NO: 276 - DNA, 401 bp, Homo sapiens
ggacgatgatagggctggagggctatggattcccagcccatccctgtgaaggagtaggccactctttaagtgaaggattggatgattgttcataatacataaagttctctgtaattacaactaaattattatgccctcttctcacagtcaaaaggaactgggtggtttggtttttgttgcttttttagatttattgtcccatgtgggatgagtttttaaatgccacaagacataatttaaaataaataaactttgggaaaaggtgtaaaacagtagccccatcacatttgtgatactgacaggtatcaacccagaagcccatgaactgtgtttccatcctttgcatttctctgcgagtagttccacacaggtttgtaagtaagtaagaaagaaggcaaatt

SEQ ID NO: 277 - DNA, 530 bp, Homo sapiens
ttttattgttgaaaagtatttatttacactatagtcacaaaccatccattatctgaacttcagttagtggttttgcgttagaatagatttattttttcacaactattaagagctaatgaccaaacaaatcagctccggtaacattatgtacattcttatctgaaatttgactacaaaggtaacacttttaagtcacaaaacaaagcatacaaaaatatactttctaaaaaaaattccaaatattaataggcagaaatatacagccatactaaactcagggagtgatttttttctccataataaggcaacccatttacatgcagaccttgtaacattgtctacatcacacaaggcaccaaggacacttccaacacaattgcatgcatcctagtttcagagaatatatgtacatcccccttaaataagttaacctctgagatcataaaatgcttacattttttcccaagattccgaatttggagacagtgtacctcaaaatacaccaatctgggtggatatacactgaaaaa

SEQ ID NO: 278 - DNA, 550 bp, Homo sapiens
ataaactcagagaacagaagtgcaatgtgatgggaggaacatagcaatatctgctccttttcgagttgtttgagaaatgtaggctattttttcagtgtatatccactcagattttgtgtatttttgatgtacactgttctctaaattctgaatctttgggaaaaaatgtaaagcatttatgatctcagaggttaacttatttaagggggatgtacatatattctctgaaactaggatgcatgcaattgtgttggaagtgtccttggtgccttgtgtgatgtagacaatgttacaaggtctgcatgtaaatgggttgccttattatggagaaaaaaatcactccctgagtttagtatggctgtatatttctgcctattaatatttggaattttttttagaaagtatatttttgtatgctttgtattgtgacttaaaagtgttacctttgtagtccaatctcagataagaatgtacataatgttaccggagctgatatgtttggtcattagccttatagttgtggaaaataatctatctacgcaaacactaa

SEQ ID NO: 279 - DNA, 460 bp, Homo sapiens
  misc_feature (1)..(460): n is g, a, c or t
accgcttccctggggctgagacgaccggttcgtcgcctccttgcccgtgaccgtcgctagaactcagttgtgcgttgcggccagtcgccactgctgagtggaagcaaaatgtcagtcagtgtgcatgagaaccgcaagtccagggccagcagcggctccattaacatctatctgtttcacaagtcctcctacgctgacagntcctcactcacctgaaatcttttacggcagcagcgtctcttcactgacgtccttctncatgccngaaataggnccttnccttgccaacgggcagtgctgggctgcatgcagtcgntactttgagggcatgttcaagttggtgggccttaaagaagaagccagggcaagttaagggtcaaacttttgacaatttccattccacccaagaagttnttgggagctngttgttttgaataatgggtaattcctncccgggnaa

SEQ ID NO: 280 - DNA, 666 bp, Homo sapiens
  misc_feature (1)..(666): n is g, c, a or t
tttttttttaaagctggggaaaagctttattatagattttagtacagaattaaaaaagttcaaacaataattgtttggaaccacaaataattaaaaggaaacacagcaatcccataaacaagcattctggcatctgttagaaattttccctcaaattatgaaatgtagctctccatgctttccaatgattgttataatacccacaaatatctgtgatttcagtggaatactttaacaaaagttttctttttaaggcatgatcctgattcattttttcttcaatatctcagtcatttcaggaactaccttaaataaatctgcaactattccataatctgccacttggaaaattggagcttctgggtctttattaattgccacaattgtcttgctgtctttcatcccagctaaatgttggatggctccagatattccaacagcaatataaagttctggtgctactatttttcccgtctgtccaacttgcatgtcattgggaacaaagccagcatcaacagcagcacgggaagcaccaactgcagcatgtagttgatctggcagtcatataacaacttannagtctcttcactcttcaagcntcgaccaccagataccaccactttggcacttggtagctctgggcgatcacctttttgtaatttctgg

SEQ ID NO: 281 - DNA, 730 bp, Homo sapiens
  misc_feature (1)..(730): n is g, c, a or t
agatgttgagagtcagttttattgccatctctgggaggggctcaaatccgcccaatctccttcagcttggccaccaggtcctcagtggtctccaccttgacgccggccgtgcgctggggcgggtcctccacactgatcacagagagcttggaggtcaggtccacacccaggtccccaggcttgatcacctcgatcttcttcttcttggctttcatgatgttggggcagcgtgggcgtaccggggctcgttgagcctcaggtcagctgtcaccacagctggcagcttcaggcgcagggtctccaggcccccatcgatctcccgctccactttcaacttgtccccctccagcatcacctgggaggcgaatgtgccctgtggccagtcaagaaatccagctgtcatctgccctgtctggttacagtcatcatcgatggcctgtttgcccagcagcaccaggtccaccttctccttctctgccagcttggccaggacccgagccacctgcaggggaccccagcgttctgcttctgctgggggcacctcacgtggatacctcgtctgcacccatggccagggcggtacgaatcgtctcctggcactgtgcangcccacagcttgacgggatgacctncttcaccagctttctctncttgagccgcacagncttctcccaccggatctccacaagaaagggtnnaatgagtgcttcacaaccatccgtgacccacc

SEQ ID NO: 282 - DNA, 790 bp, Homo sapiens
  misc_feature (1)..(730): n is g, c, a or t
  misc_feature (1)..(790): n is g, c, a or t
tggcttactattcaaagtttactgacctccccagccaggcaggccaacccttccgagcaggggaaatgtccatctagctgccctctgctgggttgcagcctatgccatgagagggtactggaagcaggagggagccctggctagggcaggccttaaacgcaagggaagctgagcagagatctgcacactcaaccccatttgatattcttctcctcctcagtcatggccagcgtgttggtgactagaccggtgccaatagtccggttgccatctcgcagggtgaaacgctggcctttctctaagatcattggctgccgcaagattaggttgaacttcaggtcctccccgggcatggcaagctccttctctgggggcaggataatccgacaggccatgtcccaagtcagggagaacatgacaggcatgaagtgggacacaaagggcttgtggcggccaccttcctccttgctgaggatgtaaacctgngcctccaccttctggtggggcttgatggaacctggcttgaccatgaccaggccccgccgcaagtcctcccgcttcaagcctcggaccagggccccgaggttatctnccgcctcggcccctctccagctcttgtggaacatctcaatgcctgtcacccacagtgcggatgtcttgctatgtcctangagctcacactcgtctcccttctttaaaatgcacgctctgtgtacctgtcaccacgtgccacggncagggacgagtacaccgnctncacaggcagcaagaaaggctttctcagtccccg

SEQ ID NO: 283 - DNA, 142 bp, Homo sapiens
ttttgtaatctgaatcgctatcactttaatcagcatctgtatgaaggcagcagacagcgtttccctcagagcagccccattcttcagcggcagggacacaaggacccacaggccccgctttccgtccgagcacagcatgccc

SEQ ID NO: 284 - DNA, 574 bp, Homo sapiens
  misc_feature (1)..(574): n is g, c, a or t
ccgcggttaaggttttattttttggaggacgcgcggcaggggggccgggaaggggcgggggcagccgagcgaggcgnggcgctcactcccgcttccgtaggtggatgtagatgatgccgctgaccagggcgagggggaaggccacccaggccagggcgaacagtatccgaagctgccccctcgcgggtgcttctccaggatctcctcggcgtgaatggcatagatcaaggcgccagtaaacaccgccacgctggtgcaaagctggcagaggccggtggatagaagagacctcctcgtcgcatggtgtagagctggaacatgaacaggatgaaggagagacagcagagaatgagggagagcaccatgaggacctgcaccgccttcagccagccattctcgctgacattactgcaggcccatgttttggtgtcgttgttccacgtgcagtcgtaccagagattcagggactctttcccagggagagtccaccaggattgtcaaagtggcacgaaaagcatataagaatgaggatgtnaaaggtgagacaccanaagagagtacatgctgcattgaa

SEQ ID NO: 285 - DNA, 453 bp, Homo sapiens
cggaggccgagcgagggacaagactccgactccagctctgacttttttcgcggctctcggcttccactgcagccatgtcactcctcttgctggtggtctcagcccttcacatcctcattcttatactgcttttcgtggccactttggacaagtcctggtggactctccctgggaaagagtccctgaatctctggtacgactgcacgtggaacaacgacaccaaaacatgggcctgcagtaatgtcagcgagaatggctggctgaaggcggtgcaggtcctcatggtgctctccctcattctctgctgtctctccttcatcctgttcatgttccagctctacaccatgcgacgaggaggtctcttctatgccaccggctctgccagctttgcaccagcgtggcggtgtttactggcgccttgattatgccattcacgccgaggaggggtttttt

SEQ ID NO: 286 - DNA, 451 bp, Homo sapiens
  misc_feature (1)..(451): n is g, c, a or t
tttacacaggtttaagaatttattaagaaaagaaacaaaagaatacagaaacaatatatataagtaaattagaaccttaaaaaatacctgataaattataccaaggtcctgattaagggagatggaaggggaaggctagtgatgctaaacatccactgtttaaacttattcattaacaaaggcacagcagaaataactataactggaatgaaaatggaaatttaatagaatgatgaaagaacactttgtataacaaggctaatgtgtttgaaaatctgcatgagctgtgatttgctaagagaaaacaggttaaattttgacacaaaacaaagaacaagcaataaccatacaaaaaaaggaaaaaaagaaaaaaacttcctagatgtcctaactccaaaccagcaagaaccaaggagagtccagatgatgtcnctgatgtgttcnccttaaa

SEQ ID NO: 287 - DNA, 370 bp, Homo sapiens
  misc_feature (1)..(370): n is g, c. a or t
cagtttaaacactttatttatacagaaacatcctccagtagtattgaggttaaaatgattcagcatttagactttaaaaattacctcaatgttcctcggagtcgtccatagtttaaaatgacttctgcacctttcttataaccttgattgaagccctgttgaagagtaactgctttgccagcatctattccatctctataaccttcctaaaaataagtaatggagaagtgcagctgtaactaagtatatacatgtaggcttttctagaaaagtacagaaccaatttagaaagcagatgaattaggcctttactcgtgttactgaccataatatggcataacaatataactaaagcngactatgcttctcc

SEQ ID NO: 288 - DNA, 386 bp, Homo sapiens
  misc_feature (1)..(386): n is g, c, a or t
ttagttgcataacttaaaaatatgaggaaattntggaatatatctctaaaaccacggaattgtcactgaaatatatatttcttgagacagtgggcaaagttcccatttatgggaaatactttccttttttcacacacatgaaactgagaaaaattatatcaaatgagaaatatttttctctaaaataatcttaagtaccccaataatgcaatacctggggaaatgtaaattttcaaaactcagatttggaacaggntattattaaaccaattattcccttaatcctaatgggttgggcaaggattttncaaaaatnggggaacctagttaaaccaccatactggtccttaaatncatattttcnaactttacataccctggtggct

SEQ ID NO: 289 - DNA, 167 bp, Homo sapiens
  misc_feature (1)..(167): n is g, c, a or t
tgaggatgcattgatgtattgatttgcctgggaacaatggcctatagttcagcctgagaattctcataaagttaagaaggcataaaaatgccccccccgagactcgtcaggagtattgactctcctacagtttaatttgctgcttttgtggnttccgggnaggcaac

SEQ ID NO: 290 - DNA, 462 bp, Homo sapiens
  misc_feature (1)..(462): n is g, c, A OR T
aaaagggaacccagctctaatacattccaactcgtatagcatgcatctgtttattctatagttattaagttctttaaaatgtaaagccatgctggaatactgctgagatacatacagaattactgtaactgattacacttggtaattgtacctaaagccaaacatatatatacctattaaaaaggtttacagaattttatggtgcattacgtgggcattgnccttttagatgcccaaatcccttagatctggcatgttagcccctcctccaattataagaggntatgaactgagtttttcctttgttgtttggttcttagctgtaattcctatgcgtctaatttcagagagccnaggagagttttgatatttaaaaggagggtttaaaactggtgatctttatgccaatgtcatcaatgggccaccttaggggccatgggcctgattgaccacattcttagg

SEQ ID NO: 291 - DNA, 499 bp, Homo sapiens
ggctctgattctggggggaggccgactccaccctggctggaggaactgggtgctcctgcccgctggcccctcgcgcgtgaggatctatctcaggtgtgtgcttcctgggagaccccttcccccgcctctagtattctagggggggagtggtccctttctgacccgggcgagtgttctgggactccagtcttggcggtaggtggtggcgggaaacgggaaagatttagaatttcttcccaccagcagaagatggattcgctcttctctagggtttcgttgtttatgttttggaggcggcatttgtaaaatagtaaagtggcaggacttttggggcgagggttggtaccccattgaaagttcatgcaaacttttagcttgtagatgcggctagtctgataaggattgttgctcccttccgaagcaagagtgagaacgagtctggaggagggctgaggcttctttgagaaactcagctgctggcgtgtgaccgtcctaggac

SEQ ID NO: 292 - DNA, 263 bp, Homo sapiens
gatagccccatgagtccaggtgttgacaaacagaaagaatcaagttttggaaaacctaaacagaaacatcatcacattcaaaaactaaaactgagaaattagatactgatctgaaaattgcttcccttctctaataaccatagctaccactaactcgcctctcctctccccatcccaacacactcaactaaccgaaaaaaatgtacggataattcatgcacaacatgcaagaattctttgcccatattttcaagctaactaca

SEQ ID NO: 293 - DNA, 410 bp, Homo sapiens
gatgatcgagtatttagagctcatggtcattgtcttcatgagatatttttgctcagggaaggaatgtttgagcgaattcctgatatagttttatggccaacatgccatgatgatgtagttaagattgtgaatctagcttgcaaatataatctttgtatcataccaattggtggaggaacaagtgtttcatatggcctgatgtgtcctgcagatgagacaagaacaattatttctttggacacttcacaaatgaatcgaattctctgggttgatgagaacaatttgacagctcatgtagaggctggcataacaggacaagagttggaaagacagcttaaagaaagtgggttattgtacaggtccatgaacccagattcccctggagttccagtactgtaggagggatgggt

SEQ ID NO: 294 - DNA, 424 bp, Homo sapiens
  misc_feature (1)..(424): n is g, c, a or t
tcaaagtaatcatttcactttaatatccaggtttgaatgtacaaatgcttgctaaatgtgattaatgttctcattatttaagaaacaggatatttcaaacttttgattatggtatatgcattaatacattacatttaaaaaaaattaggttaaaccagttattcaaaaaaggcattaaaccattattaaaaactaaattgaaactttactttttatatgaaaatttatcatgccattgggattaattttaaaaaatcaaaaatgatcttttgtcattgaaactgctgaggctttcaaantcagtagttgaaatgatgactggttccctttaggtgaaacaattcntggcaattgggagacattaaggtcnaaggagttttccctccgccccctgccggtagccggtttcctccngccttnccag

SEQ ID NO: 295 - DNA, 20 bp, Artificial Sequence
  There is no sequence information for this end of this clone.  Thi s is a place holder.
  misc_feature (1)..(20): n is unknown
nnnnnnnnnnnnnnnnnnnn

SEQ ID NO: 296 - DNA, 201 bp, Homo sapiens
  misc_feature (1)..(201): n is g, c, a or t
tttttttttttttttttttttcattttcatatcaattggcagaaattatctttattagaaaaatgaaattttccngtatttacatttttacaccatatgaccgggcacttctgttgccncaggagttatatacatatcagtttgcacacgantttcaatccccattccttaaaacagttgataacacattgaacaaaatta

SEQ ID NO: 297 - DNA, 506 bp, Homo sapiens
  misc_feature (1)..(506): n is g, c, a or t
tgcaatcctagaacattcttcattagccctgggtcatgacctcttccagttaattctctttcacacctttaggaaagatttaagatgaaccttcaataggatattaacataactcatagccaataccacagctgcctttcaaattaatgaggttaattgttctccagcaaacatgagtttgtctttggcattttaaatgcttcccattgatctgacattttgctgtttcaagttttaaagggctcaaatcaaagactattgataactgagcaaagagcgaagatccagaaatacganaacattgtctttttttttccatggaaaaacaatcatagccttttggaattcaatcgaagtttctacattagccatctaaggacttatttaattatttctgttctcagtcaagctaattccaagtgaatggaacagtattggacttttaaaatcntttttaaatttttttaanccttaggtttattaaggttgtaggncaggtccggggg

SEQ ID NO: 298 - DNA, 483 bp, Homo sapiens
  misc_feature (1)..(483): n is g, c, a or t
caccaaccagtatttctgattttcttcttgatactggattttaaaaccttagaagtctataaatactgcattcagactttccacatcaagagaaaggggccagggcagaagatgtcaggccccatgctgttttggggtgggaaaagtggcaaagaattctcaacagcctgtgtcagttttctaacttaattgaaacacctttaagctctccttcatccccaaactttcccctatggngtctatgatagaaaaacacttctctctcatatatgtcccatcactagggngccagggggaagggagtgggcattacacaggcaagccaaactttttattcagccagaaaatgggatttctgattcagtttaatgggtaaggagttgtgttaaaaccgtaccaagtcctgcttcttnctcagagtgagctggggctgcatttttgtgactgggaggcatttctcataatgggggaattaggcactat

SEQ ID NO: 299 - DNA, 443 bp, Homo sapiens
  misc_feature (1)..(443): n is g, c, a or t
aggaataaaaaaaatccatcctacatcttccctaagcactgcctctctctcaccccccaaaacaagttgacgaaagggttttatgtagctgtctatgaggaattggccgtgtctgggtgggttatgggatgtgggcatccctgggttcttggaagcagctcttatgctactcatagagatgggattgactttatttttttatagtgcttaattcaccattatgagaaatgcttccagtcacaaaaatgcagcccagctcactctgaggaagaagcaggacttggtacggttttacacaactccttaccattgaaacttgaatcagaaatccctttttctgggctggaattaaaaagtttttggctttgcctgttgttaatgcccacttcccttnccccctgggttccccttagtggatggggacatatattgaggagagaagt

SEQ ID NO: 300 - DNA, 273 bp, Homo sapiens
  misc_feature (1)..(300): n is g, c, a or t
cttatcagtcccttgtatttacctggtcaccctccatctctgagggtatgggggccagatggctcttgctgccctgatgttttggggggtctgcctgggcccctcctggtgtgtcacacgcgtccagtcctggccccctaggaggcagcatggcagngactgggaggccgagcgggcccagctgcagagtcagctgcagcgttganagggaggagctgctggcccggcggaaggcttgagaaggaacagctgagtgaggagatttgctnccct

SEQ ID NO: 301 - DNA, 374 bp, Homo sapiens
  misc_feature (1)..(374): n is g, c, a or t
ttttacantcttgtcaccagcacttttattaagacgtgaaaagacaaagacaacagaggagagcagagaataatatctctgtttcagctattccaattatccagagtccttgatctgatgtagtaaagagctagggacattttccctgaaggctttgattgctggcaaaatctcattaaacgtgtatacattcataggttggccataggatggataaaagaagagcctctggccttacatctgccacgntacatgtgcaaaaatgctctctgcaggcattatttttcattggtaaaataggcaggaacggaattttattattcaataatttattaaatggggccaaatggtatggtggcctatatttggggcca

SEQ ID NO: 302 - DNA, 386 bp, Homo sapiens
tggacagaagatgtgggtgtaggcagttttgataaagtagatgctccattagcatcaaatgatttctttggctggtgatcagactgtagcgtaaatggactagaaggaacagtgcttggggtagcagttggatgaaccactggtttgatggggtgctgtactggcgtagaactactgtgagtctctgctcttggcagtctgtagtctctgtcattgtgtctgcttgtttgagacaaaatattctgtggggagcaaactactgggcatcactgggaatgcttgtcttccattccactgggcaaacccactagtgggctgttgcttgcatcacctctcttctgtaatccctatcttttggggaagctgttgactgccatcttgtttgc

SEQ ID NO: 303 - DNA, 377 bp, Homo sapiens
  misc_feature (1)..(377): n is g, c, a or t
nggaccagttactctccacaagaaaattcacacaaccacagtgctcttcatagttcaaattcacattcttctaatccaagcaataacccaagcaaaacttcagatgcaccttatgattctgcagatgactggtctgagcatattagctcttctgggaaaaagtactactacaattgtcgaacagaagtttcacaatgggaaaaaccaaaagagtggcttgaaagagaacagagacaaaaagaagcaaacaagatggcagtcaacagcttcccaaaagataggggttacaggaagagaggtgatgccaggcaacagccactagtggggttttgccagtgggatgggaggacaggctttcccgttgttgcccgtngttt

SEQ ID NO: 304 - DNA, 349 bp, Homo sapiens
  misc_feature (1)..(349): N IS G, C, A OR T
cgctgcagtacagcctgctcctgcagtacctggtgggtgacaagcgtcaccccggctcctggagcctgggagcctgggcgngancccaagtccagccaagagtgaggagcagaagatgatcgagaaggcgatggaaagctgcgctttcaaggctgcgctggcctgcgtgggaggatttgtcttaggaggtgcatttggggtgtttaccgctggcatcgataccaacgtgggctttgaccctaaggntccttaccgtacaccgactgcaaaagaagtgctgaaagacatggggcagagaggaatgtcctatgcccaaaaattttcgccatttgttgggnagccatgtttt

SEQ ID NO: 305 - DNA, 427 bp, Homo sapiens
  misc_feature (1)..(427): n is g, c, a or t
ttaatatccatngcacacaactaggccaagaaaaataccacaaggtcaagtcgaaaacacgacatgttaaaacacttccttgaccctggagaacgaggatggtggtgaacagcccctcagcgacgtctgatcttggccagtagctgctgtgaccgagtcaccaagatgaccacagcaggacccttcacatgtggcctcaagctcggccaggtccagcagtcacgtcgtgaaggcagtgtgtgcctctcggccggcacaggaggggcccatcgagttatggatgggatttcactgcatcccagggaaaaggctgggctgggcttcttgaggcaggccctgggcagatgttaatggagcttggttgaggatgacacagtcctcttaacaaccntgccttcagtgtcnccattccctccattttccctgg

SEQ ID NO: 306 - DNA, 368 bp, Homo sapiens
ccgcaacacacacaaagaccggcatcagatttattattatctcttgttaaatattttcgatcttttctcagaacatggtctagaagggcatagtagtttttttcccggtacatgcgtgggtgggtagtgaggagaagggagcagaggtgcgcgccaggagccaggctggttctctgagagaacaacctccagatcctcccagggaagcccgacacgccagtcccacgttggacgacgtgcagaggaagggggaggtccacggggacgacgaagatgaccttatacgtgcactcggcatatcctggagtaacgcgcagtgggggaggtggggaggggagggtcggccgggcaagcccctgcccgctgcg

SEQ ID NO: 307 - DNA, 401 bp, Homo sapiens
  misc_feature (1)..(401): n is g, c, a or t
caacagaacttcacagactgttagagctgctgagaagaatttgctttccgaattcagcctggaagngcaccaagggacagctgtactgagtctagatgactctgacccccgccccaggtcaaggccagcagagcagtcagtgcctctggagaaggcccttgctctcccacctggcccagactccgaggagcctgggtctggagctgccggtctggttcttccctttagaagcccggacgntgccaccttgcggcccctcccaagccgtgaaccagctcatgagagatgaacacttgtgggattccacttcaagaaaggttcngggggttggcacaaaaggancaacccaagcatttgccctgtggcaaccaanacttcagttggacatttttggggacctg

SEQ ID NO: 308 - DNA, 423 bp, Homo sapiens
  misc_feature (1)..(423): n is g, c, a or t
tttcacaaaaagctacaagtttattaacataatgtattccaatatgtatcaaagtttcaagcaggtcattttgaacctcaaataagaaatcacaatatttagtattaattaaaaaggaaaaaaaggtggtagttgtcattcgtgggatttagtccaaatngaaaatgtagaaaacatttattttggtggatctgtgttgatgccatatttctccttgagaagcttcaactgttcctccttcttctttgtgtccatcttctgaaatgccctgttggcattatagtacaaaaccacaaggtatctgttacaaacattgaatccccgatangtgattcacatgcattcttgggcatcaaagatgtcctcatagaccacataagctgttccncctaagtttccagggtgtgttccccactccggatt

SEQ ID NO: 309 - DNA, 432 bp, Homo sapiens
  misc_feature (1)..(432): n is g, c, a or t
ccgggctgcaggaattcggcacgagggacctattcgtcaaatcagagtggggaacacacctgaaactagaggaacagcttatgtggtctatgaggacatctttgatgccaagaatgcatgtgatcacctatcgggattcaatgtttgtaacagataccttgtggttttgtactataatgccaacagggcatttcagaagatggacacaaagaagaaggaggaacagttgaagcttctcaagggagaaatatggcatcaacacagatccaccaaaataaatgttttctacattttcatttggactaaatcccacgaatgacaactaccacctttttntcctttttaatttaatactaaatattgtgatttcttatttgaggttcaaaatgacctgcttgaaactttgatacatattggaatacattatgttat

SEQ ID NO: 310 - DNA, 475 bp, Homo sapiens
  misc_feature (1)..(475): n is g, c, a or t
tttttttttaaaaattctaaattacaattttatttgtatttaaaaatacattggaaattctgcatattcccatgatcaaccttattttcaatgcacattacttaaattttgatgacacagttgattctgacaagtcctttttcaagctgaacaccaaaatagggaaacncctgtacatttccatgggccctgttcccattgatgtatactgcttccttactaacagtgagggatgactttcatcagtcttttatcacctgaacagtcttccggccataatgatagtaactataagctgatgcagctgtggtgaaagctcgtaaaacaccatagtatcngaagataaatgctntcagcatagttnaaaactgggagcttgcccaaagaagcttgccacccagatttaacngggactggctgtattcaccttggctngatgaatgttggttttaaccctaggcagtgggnataagca

SEQ ID NO: 311 - DNA, 332 bp, Homo sapiens
  misc_feature (1)..(332): n is g, c, a or t
aaaggtccacaggctttttaatggtgtgatggctacttcccttccgagacccgatctaatcattgacagtggcttccagggtgttggggtggggtggacaggtgcaggatgggcagaggccatgcagtgactgggaagggcttggggaggggtgttacattctgtttggcatgtaaacattcttaggtggcttcccgagggaggggaagggcaactccctgctccccaccccatgcccaccagggtgggtccctggagttcagaagactgagcaaaccaggcctctgtgagganctgggaaatggggancctgggganagcctnctcctctc

SEQ ID NO: 312 - DNA, 395 bp, Homo sapiens
  misc_feature (1)..(395): n is g, c, a or t
ggctctgcagaccagctgaggggaggactcctgggtggacagcctttgacgtccaccccacgctgatgcagaagctcccagaacactcaggaaacttctccggacagagccctccttgtcaacttgaggncctcccaaggccctctactgccctctgggtccagcagagggagtggaggaagggcactgctcccacctagagcttctccgaatgacaatcagctcgtgccaggtggggaccaggatatgactcctggtgcccaggccctgggctgctancttgcccgccaaccngaaccgtgaantgtagggcccccaagccctcacctctgccccaggaccaaacaaacaccctgggttttggagctngggaaggaaagaaggggggccttgag

SEQ ID NO: 313 - DNA, 441 bp, Homo sapiens
  misc_feature (1)..(441): n is g, c, a or t
tagagagcttaggattttatttttcgtttacacagggaatccaagaaaggagacagacaaagtgagtctcaaggatgagagcagagaaaagctcgagataagagctgtgcagccgggtcaggaagtgatcggtctaggtcggaacaggagaatcagttagacacaacggatgtgtttgagcctttggaaaacggtatcgttaggcatgtggcaaaaacgttggggtacttgaaaaaaaggctggccatgggttagtaaaaagctagatatgtgaaaatattaggtaattattaactcaaaagaaaaaaaaagattgtcacaggaattgtggcatggttttatactcgtgagcagtgaacagcaggtactcaatccatgaagagctaagcctgatttcctcacgacagctgtgaaagtttcaggtacccaaatnggaaccac

SEQ ID NO: 314 - DNA, 251 bp, Homo sapiens
  misc_feature (1)..(251): n is g, c, a or t
catcattcaaacttttttatttacaataatatttaacagtctttatgggcttaaatgtagtagatatcacctgtgcatcaagcattacacttcattcctttaagatgtgcttcatcctcactcaagctgcttgccaccctccgatttctggtccagtctactcttgttactcttcaccatgtagatgaagtaggcaagggtctctttttcattcacagggatgttcctgaagttnccgactcagaagtttt

SEQ ID NO: 315 - DNA, 451 bp, Homo sapiens
ttttttttcagtaatagactcgtttatttctcagaatttagtttgctgcttgatattacctgcaaatgtgaggcaatcacacaatgtccttgaggctctaatcccagacttgtctgagcaccgtccacaggcagctcggcccatcagaggtctgaaacaaacctcctaacttgggccaggtattttggtttcaaatagtcacccagctcatccttagtgacccacacatgatggcccttattcccagcctgggaaaagtctccagttaatagcagtgctttgaagaagaacaccttggctccgaggttactctctgtccgcattgcctgggggaacttgaatgtgtagtgcccacagggtgcatttcctaggaacttggcttccatgttgatttctgagagtgtggccagggttcgttcagctgttcctcgaagggtctccccaggctgcc

SEQ ID NO: 316 - DNA, 421 bp, Homo sapiens
gcgtctctactgcagcagattgagatagagagaagcctgtattcagaccacgagcttcgtgctctggatgaaaaccagcgactggcaaagaagaaagctgaccttcatgatgaagaagatgaacaggatatattgctggcgcaagatttggaagatatgtgggagcagaaatttctacagttcaaacttggagctcgcataacagaagctgatgaaaagaatgaccgagcatccctgaacaggaagctagacaggaaccttgtcctgttagtcagagagaagtttggagaccaggatgtttggatactgccccaggcagagtggcagcctggggagacccttcgaggaacagctgaacgaaccctggccacactctcagaaaacaacatggaagccaagttcctaggaaatgcaccctgtg

SEQ ID NO: 317 - DNA, 397 bp, Homo sapiens
tttccagggtggagaaatatttaataaaatcagagtcgagagaaagtcacttgcacaattcatctcctacattcactgctggccaggccaggggcacctgggattgaaatcaggctgacctccggacagccgtactagcgcactgtgtctcggggggaatctcagggtgacgctgaggccgagtccccaaaagccaaggaagccagccccacaggctggggagccctgaaggccgggggagctgtggctgcactgcctctatcctgctgagtgtgctctgcccaggcctcactccttcaggagcttgtgcttgactgtggtgctctcggagcagagatggatgaagagggtgccggcgcggtgcgggcccgagctcctgcagctcatagtcatgggc

SEQ ID NO: 318 - DNA, 388 bp, Homo sapiens
aaaacacattaaaaactttattgtaagtatcaacatctaaatttgcatcaatttgatacatcgttgctcattttgcagaacataacagttgcacattgcaagagtcaacttgcttcgggtcttttcatgctcatggcggtccacccctgccttccctctccctgacctgcatcctgtcctccacagtctgccctgcctcctgtcgccacaggttgaagacccaagccctgaggagaacctgctgccagggggctggctggctgcgagccaggagggccaggcagttagccctgccacagggaggggcaggcaagggatcgtttctcctcttcctgggctgagcccgtgccaggccagccacagagtgccctagtcagcccatgtggct

SEQ ID NO: 319 - DNA, 462 bp, Homo sapiens
  misc_feature (1)..(462): n is g, c, a or t
gcgnggacntttcgcgtganttngcttgccaggtatggatcccggagcgcgcagaggagtccctgaggagctagggaccccaaaggcctttcaccgctgcgggccagtcctcagtcagctggagggtgggtcccacggaatcctgttagtttctaccacctcctcccccttctctgggagctggtgggagcttcagaagtcctgtgggagcgttcggctggggatcagtttgtctcgggtgaaaagtaaanttttgaaagnttttccagagtgtttgaatctttcccaccagaaaantttgattcacatncaatattcttgcagtttccaatttttcccaaaaaggaaggaagttaggctggatttttcagnttttctgtggggattcnttttattttgggggaaaaaggacaattggaccattttcaaggaccaggggggaggccccantttttnacccct

SEQ ID NO: 320 - DNA, 388 bp, Homo sapiens
  misc_feature (1)..(388): n is g, c, a or t
ctgatttggatgcccttatttatttctctggactgatggctctggcagaacttcagtcctgtgttgaatagaaggggtgaaagtgggcttcctggtcttgaatggtcattgtctttttccaataaagaatccacagaaagctgaaaatcagctacttcttctttttgggaaattggaactgcagatattgatgtgatcaagttttctggtggaagattcaacactctggaaagctttcaaagtttacttttcaccnagacaaactgatcccagccgacgctccacaggacttctgaagctccaccagctccagagaagggggaggaggtgggtagaaactnacagggattccgtggggacccaccctncagctgacttnagggacttg

SEQ ID NO: 321 - DNA, 567 bp, Homo sapiens
ttttttttttttttttgtataattattatttttaatgtccagaatgtgtaatacaagggccagagcttcctcctggactcaattttataaattctcaattggttggtgaggccaatagggatactttttcttgtctaatttggtttctgggaaagcttcattcaggtcctcaatggtcatctgatcaaatggaattaagttcttcatcttctccatctctttctcatattctacaatcctggcctttgagagagacacccactcagcacaagatttcacatcttctttttcttcggcatccacctgggcagtatatttatcctctggcacgggaaccttcagcgcattaaacttcttctcaaagtcatccaccaagccagccttggccacattggctttgtagtaagcccagtcgatagctggtggattctcaggtaaagcagccaacctggaggtgagggtctcattccaggatttcagggaactagcaatggccttttggttctggggtatgatctctgcaaaagctacccagtcaatggtttttagagcaagttttcgcccagc

SEQ ID NO: 322 - DNA, 248 bp, Homo sapiens
tttcacacaacacaggaagctttattcatccgctgctggtccaaagagtgggtcgcagggtcactcactttaatatgctgtcatcttctgccaattctctggcaatccgtttcagttcatcctgcttcttcttctcttctgctgctatcctcctctcctcttctgcccgaggttttaggtaattgtagcgcgtggctccgtaggccacaccgaggaacagggcggagtagcggccgagcttgatgagc

SEQ ID NO: 323 - DNA, 282 bp, Homo sapiens
ggacaagatggtgccaccggtgcaggtctctccgctcatcaagctcggccgctactccgccctgttcctcggtgtggcctacggagccacgcgctacaattacctaaaacctcgggcacacgaggagaggaggatagcagcagaagagaagaagaagcaggatgaactgaaacggattgccagagaattggcagaagatgacagcatattagagtgagtgaccctgcgacccactctttggaccagcagcggatgaataaagcttcctgtgttgtgtgaaaa

SEQ ID NO: 324 - DNA, 389 bp, Homo sapiens
aacagtgaaccatatttcaatttattgacattgtcaatttatgaacaagacaggatttttttttttcccatggaatgagatccttttcaatctgccataacatgtgcccacacatcttcaccttggaaatgtagcatttcaagctttagtcagggtctaggaggaaaaagaaaatgcaagttgctggctagttctctgtgttttcttaaaaactcaacatgaatataagaaataacttccttatagtgaactgtataactgtggctatcattcacattgccgtggctcagatgtaaaaagtgctggttcaagtacacaggcttagtcaagcaggcattttcctgctgagtaaaagtaaacactctcccagaataaagaaactactttgc

SEQ ID NO: 325 - DNA, 417 bp, Homo sapiens
  misc_feature (1)..(417): n is g, c, a or t
cactgangggaatttattataatctgttagtagcacacagacaaatattagttaaaccagaaccatgtctacacagaagtgggcaatgacatgtgccattctatggaacngggtgtgcacttaatcatcatgttttagcattttgatcttctgcttatggcgctcaatttctttctgcagacgctcaatctccttcttatgatgaacgatttcttcttcatggtgttttttcaaagctgccagttgttctctactctgtgctcggaaatatcgttcctcttcagcctgctctctctttccgagggccccaccggctttcccggatggggggcccgcggncccgggtcggacattntcgggacttgatccnaggccgaaggcctcggggttttgcatgggggccctcacgggccccac

SEQ ID NO: 326 - DNA, 450 bp, Homo sapiens
  misc_feature (1)..(450): n is g, c, a or t
agaggtgcagctccagcagcaatggcagtgacggcgttggcggcncggacgtggcttggcgtgtggggcgtgaggaccatgcaagcccgaggttcggctcggatcagtccgagaatgtcgaccggggcgcgggctccatccgggaagccgttggggccttcggaaagagagagcaggctgaagaggaacgatatttccgagcacagagtagagaacaactggcagctttgaaaaaacaccatgaagaagaaatcgttcatcataagaaggagatttgagcgtcttgcagaaagaaatttgagcgccntaagcagaagatccaaattgcttaaaacntgatgatttaagttgcacaccgtttgcccttaggattgccattgttccttttgcccatttnttgttttaggacntgtttntggttttaantatttttttgttcttgtgttgntt

SEQ ID NO: 327 - DNA, 350 bp, Homo sapiens
  misc_feature (1)..(350): n is g, c, a or t
catcttttaaagtcttaatttatattttaacctcaaacatattatcagtgcctcagatataatttaatcttaagtctttaaaggccccctgaaacaaaagtatactttttatttaggcttcctcactttctggtagtcactttcacccagtctccagttttaccctgacttagagtccacaaacttcatcagaccctctgtgctcatggacttgggcctttctagagggaagcctaaggctcggctccagatgagctgtgccaagtacacccaatgctcgtgacaccccaaacaggaccgtgtaagtaattcatctccgtcatggccataatactgggagnagaaccccc

SEQ ID NO: 328 - DNA, 442 bp, Homo sapiens
  misc_feature (1)..(442): n is g, c, a or t
cagggctctccatggactggcaaatcaggaagtgcttgtctggctaacacagctgcagaaggaagttggcaaagatgtgtcagatgagaagttacgagactacatctggaacacactcaactcaggacgggttgttccaggctatggccatgcagtactaaggaagactgatccgcgatatacctgtcagcgagagtttgctctgaaacacctgcctaatgaccccatgtttaagttggttgctcagctgtacaagattgtgcccaatgtcctcttagagcagggtaaagccaagaatccttggcccaatgtagatgctcacagtggggtgctntccagtattatggcatgacggagatgaattactacacggtcctgtntggggtgnacganaattgggtgtctgcacantcatttgagccgancttaggttcccctagaa

SEQ ID NO: 329 - DNA, 530 bp, Homo sapiens
ttgttcttgcagcccggcatgccagtgcttcctccacgaatttgaaagacatattggctgacctgatacctaaggagcaggccagaattaagactttcaggcagcaacatggcaagacggtggtgggccaaatcactgtggacatgatgtatggtggcatgagaggcatgaagggattggtctatgaaacatcagttcttgatcctgatgagggcatccgtttccgaggctttagtatccctgaatgccagaaactgctacccaaggctaagggtggggaagaacccctgcctgagggcttattttggctgctggtaactggacatatcccaacagaggaacaggtatcttggctctcaaaagagtgggcaaagagggcagctctgccttcccatgtggtcaccatgctggacaactttcccaccaatctacaccccatgtctcagctcagtgcagctgttacagccctcaacagtgaaagtaactttgcccgagcatatgcacagggtatcagccgaaccaagtactgg

SEQ ID NO: 330 - DNA, 130 bp, Homo sapiens
caacaccgcaccagcaccccaccgcgaccatccacaccccgccaacgactcctggcctcaccccgctccaacacgacacccggcacatcccgcacagccgagcccccactccaacaccccgcaccacgca

SEQ ID NO: 331 - DNA, 463 bp, Homo sapiens
  misc_feature (1)..(463): n is g, c, a or t
taaaatcaattattttatttctaccatcaggtaatgaaaaggactaggatccatctataccatcagatgattttttgatgaagcaattctgaaccgggtaatagaactgcttgggaaagcccaactttttctggaaacaaaagattaacatttcgtcccttcataatctcagtgaatacaatatacgataaattccaaggaattcaaatttaactagcattcattaggttgatgaaactaactctataaattacatttgatttagctgtacaaaaacattaagatgaacacaaacaagaatagtatatgcaagggtctactttttacttcacaatagaccacaaggaagttaatactttatactccttaaaacagaggcagttacaaatttgcaggaaccaccaactggaataaactggcntatatnaaacngaggggaatttgggccaatattttaatatcc

SEQ ID NO: 332 - DNA, 131 bp, Homo sapiens
  misc_feature (1)..(131): n is g, c, a or t
ttatacttttaagcttagaatgtatgttcatttccaaattttgtatcataagagttttcaacatagaganaagctgaaaaaatgcaaagaataaccacatactttccatctaccttcccntggttnacggg

SEQ ID NO: 333 - DNA, 478 bp, Homo sapiens
  misc_feature (1)..(478): n is g, c, a or t
ttgaaatttggctaatattttaatatcccaatgaagaatctgaaaaacactctctatgaagaacatacggaatccactcttcaacagaaaagcctgcccattaatgacactccaagaagtgtcatgatatatgcgattcactttcaagtcttcagcaaactaaaaatagagttatgagacttaaacagataatagacagtgaaagcaaatatgacaaaacaaattattatatgataaacaacccgttaacaaaggaaggtagatggaaagtatgtggttattctttgcattttttcagcttttctctatgttgaaaactcttatggatacaaaatttggaaatgaacatacattctaagcttaaaagtataactgaaattagtctcntttccccnttaaatattaaacatatttcnggtaataattatattttatttgggggattttccatggaacttttaaacccatccatagaggt

SEQ ID NO: 334 - DNA, 507 bp, Homo sapiens
  misc_feature (1)..(507): n is g, c, a or t
gaaagccaaaagttgcctttcgagagaccattactgcccctgtcccgtttgactttacacataaaaaacaatcaggtggtgcaggccagtatggaaaagtaataggtgtcctggagcctctggacccagaggactacactaaattggaattttcagatgaaacattcggatcaaatattccaaagcagtttgtgcctgctgtagaaaaggggtttttagatgcctgcgagaagggccctctttctggtcacaagctctctgggctccggtttgtcctgcaagatggagcacaccacatggttgattctaatgaaatctctttcatccgagcaggagaaggtgctcttaaacaagccttggcaaatgcaacattatgtattctttgaacctattatggctgtggaagttgtagctccaaatgaatttcaggggacaagtaattggcaggaattaaccgacgccatggggtaatcactggggcnagatggagttgaggactattttaca

SEQ ID NO: 335 - DNA, 378 bp, Homo sapiens
tataccaaggctttgagatttagcttgtgctaaatcattttttaaaattgtagctctgaggcattttattataaaaacttagtactcatatacataaactaatacgaacttaaaattcatcatacatttacttcattttttagcttgaccttctagtaaatctttagcttcattgattttggctgctatataaggagatcctcctttgtcaggatgatttaaaagcataattcgtcgatgagcatctcttattttccctttattggcagtagggcttacacctagtattaatgctgcttcccgttttgtcattttgggttcaaacccacctctataatagccaccactgaaggcagattttggtaggctttgaaaaac

SEQ ID NO: 336 - DNA, 164 bp, Homo sapiens
ttttttttttttttttttataggataaaatttttatttgataatcattttgtgactattctgttcagtaatatgcagaaagacattctgaaatctgttaatctctaaacattttaacgttagcttgccatacttgaaagaaactggctagctgcagtttacatt

SEQ ID NO: 337 - DNA, 378 bp, Homo sapiens
tttttttaactgactagtgttttatttgaaagggaaaaataaagaccaccccatgcattgtccatcccatgaggcagggctgggcaatgcaagacaatctcaaggaatggaggtccctgagcctgggaagacatttgaactcagatgtatcgcctgatgctaggaagaggggctcagtatggcaaatctggaggctttaccctaggcaaccagggagagcaggcaggagctaccccagtacagggaagggaaaggagcaggggagccctggactggggaagccgatgttggtcaagggccctggaaaacaatgcttttggcagaatacatgaaaaggttggtacatctcggggtgcccgtctaccgggagccagtgtc

SEQ ID NO: 338 - DNA, 470 bp, Homo sapiens
ttctttataaatatttttatttcctatcttatggttacatatatattctttatgtgctccccttgtacatctattcacatgtgacttccatatgataactgctttgatatttaagcatgtgctaaaagttatcttagttgagatatgaaaaatgctttagatggataacattctgagtatattggattagtcacagcagaatttactttagttagatgagttctacaaatttaaagctttgaaaagctactacttttacttctaatacatccagatgaacacgatgtagcaatatcagcttgtattccagagaaatctcattagtttttctggtgatggaaccacttatccacgtctgttggtactgtgcaggcagattcccagggtggtggtaaagcatccacaatggctctggcagcatcaggatcacacttgaaggggctctcagacaaagttgtattcatgcaact

SEQ ID NO: 339 - DNA, 575 bp, Homo sapiens
  misc_feature (1)..(575): n is g, c, a or t
ggggacgcccgccttccctgcagcccgggatggcaaggggcgacgaagaggcttctggtgcggtcggtctccggggccagtaaccaccagccgaactcgaatagtggcagataccgggacacggtcgctgctgccgcagacgagcttccccatgaagctgctgggccgccagcanccgcgacacggagctggagatccagcagaaatgtcggattttcagaactttattcatggcaaagagaaagaaaagtaaagacagaattttgccttcatgatggacctccttatgcaaacggtgaccctcatgttggacatgctttaaataagattttgaaagacatnagccaatccgattccatatgatgaatggctccaaaatacattttgtgcccggctgggattgtcatgggttgcccattgaaataaaagtattatcagaacttgggtagagaagctcaggaatccttttcagctatggaaatttagaaagaaagctggatcatttggctaaagcagccntttgggaaaccggaattcagcttttattcngttggggaaaatggcagatttggaan

SEQ ID NO: 340 - DNA, 529 bp, Homo sapiens
  misc_feature (1)..(529): n is g, c, a or t
gcaccaatttctcctctttcaacaaattctttgcagtctgaagcatctttataaccacatcagttccctcttcaaggacagccttgttttgaagttcaggacctgcaacatctgtgaaaactccatcttcgtccactagacaatccatgggcaggttgtgctgagacgctacaccgtagtcttccataccatgagctggggctgtgtgaaccaatcccgttccttttgccatggtcacatgatttgcaggtaaaagaggagaggctttatcaggaattaatggatgactgcaagtaccattttccaaatctacacctgaaagttgtttgaaatagtctcaaatgttgtttccaaagtaagaagcaacangatgctaacttttatctgcccgccnagtacggtagaaggtctccagacttaagaacatttcacaacagcatacttttgattcaggcatatagcagacagcntccantgggctggaatccgtccaanggttgtgtgggtccagacccaaatncttacaggg

SEQ ID NO: 341 - DNA, 309 bp, Homo sapiens
gacgctggctcactttatttttggccccaggtcaggtctcccaaaggtttcccagcagtcacttcagagtctcctgcagagtcaccatcaagcagacctcttcctcgggaggccgtgtcgccaccccaacccttggacttctggtatcaccatctcctgtcacctgggctccagtctctgtccgatggcctcaacaggacatcaaagcatagctaccagtttgaaaggtgccctcaggcttggcaggaaccacgtggacaaaagtcttgtaagagcacagcaccctttgggcagccttggtgatcaaga

SEQ ID NO: 342 - DNA, 429 bp, Homo sapiens
  misc_feature (1)..(429): n is g, c, a or t
aaaacctcggtggaaagtcatcaggcagacgcaaggcattaaaaatggaaggtcactatgttcatgctgggaacatcattgcaacacagcnccatttccgctggcacccaggtgccnatgtgggtgttgggaagaataaatgtctgtatgccctggaagaggggatagtccgctacactaaggaggtctacgtgcctcatcccanaaacacggaggctgtggatctgatcaccaggctgcccaagggtgctgtgctctacaaagacttttgtccacgtggttcctgccaagcctgagggcaccttcaaactggtagctatgctttgattgtcctgntgaggccatcggacagagactggaagcccangttgacaggagangggtgataccaggaaantcaaagngtttgggggtgggcgacaacgggct

SEQ ID NO: 343 - DNA, 457 bp, Homo sapiens
tcacattaccgaaaggccaagtaatgtggtgtgattactataattcctacaacaaaacttccacttagaatagttacatgttcccaaactatttttcttctgtctgccatgctggcttctgtatcccatggtccactgtaatcttttggtcttctttttttgcagtacagcagtcctcgtgctgctatccattgagtaggtaaaccaccaattcataggtggccatcataatggctgtgtttggaatctgtctcactagatgagttgtcagaccacgataaagagacccataaccttcttcttgaacaagcaaagatagagtctgaaaaaaagatctgtattttgttccctcttcacgtagtcttgttcttacaacttcatgtggatatgctatagttgtggcacaagtttttgaggtggcagcagctagcatcattccacaaaatctgatgcttct

SEQ ID NO: 344 - DNA, 425 bp, Homo sapiens
gtaaaatttgagttactcagttactgacatagaaaagaaccctgtgagaccaaattcagctttggaaacaatttagtgtaattattttgcatatgtagatacacctttgaaagccaagaaaggtttatgattggatctgtactatattaatttaaaaacaaattattcttaagtatattgtagcatttctgttcctgtaagtactttactcatcttaaatgtactgatcattagccacctttataaaaagaatgtgcctgacccactagtatttgatagaaatattaaaacagttaagatccttaaacatttctgcatataattttttattgagtaaatgtaacttaacgtaagtagttctatgaagtctgtgtaaattaaaaccctgttttgtgtagatgaagcaatctttataagtttctgtc

SEQ ID NO: 345 - DNA, 379 bp, Homo sapiens
  misc_feature (1)..(379): n is g, c, a or t
aaacgggctttaaatactcatcagggtgccacacaaaggagctggggtgagaacttcgtacatgtgagtgtggggctggggtgccctgagagagaaaaaggggacccatctgtcagggcagctggggtgcnccacccccaccctgggactagggagcagagtagaaaccctctctggagggtcccagggctaactgggagccagccctcccttcgaggtagaccatcggggagggaaccgangaagtagctcccatggtggcagtggcttcctcagtggtactgctgatagctggggtagcctggggccggggtgccatccttagggggcagctggctggggtcctccaggaatgggggcgcatttcggaactgctggg

SEQ ID NO: 346 - DNA, 157 bp, Homo sapiens
  misc_feature (1)..(157): n is g, a, c, or t
tggagccttcactatgggtgtcatcggtggcggagtcttccaggccatcaagggtttccgcaatgcccctgttggaattcggcaccggttgagaggtagtgccaatgctgtgangatccgagccccccagattngaggtaacttcncaaatgnttgg

SEQ ID NO: 347 - DNA, 404 bp, Homo sapiens
  misc_feature (1)..(404): n is g, c, a or t
gatattnaaaacattcaaaagcaattaaagatcagacataggagaaaccctgaatagaaacaaaacttttgaatgctggattcaaaaaaaaaaaaaagttatctggacagcttctttgagactatttaaaaactggtacaacaggtctctacaacgccaagatctaactaaggctttaaaaggtcaagaagttttatggctgacaaaggactcgcgcaacgcgnaaggcctttcccaccttaaggcttccggggntctgggganttttacccccattctcttctgtttgtctgaggtctcatctctctgcaggnaggggctggaaatcattttgtttgggttgttttggggggagagaggccggggtgggggggggtgccaaatctgcccagttctcgtgcccg

SEQ ID NO: 348 - DNA, 270 bp, Homo sapiens
  misc_feature (1)..(270): n is g, c, a or t
tgcagagagatgagactcagacaaacagaagagaatgggggtaaaattcccagatccccggaagcttaaggtgggaaaggccttctgcgttgcgngagtcctttgtcagccataaaacttcttgaccttttaaagcttagttagatcttggcgttgtagagacctgttgtaccagtttttaaaatagtctcaaagaagctgtccagatancttttttttttttttgattccagctttcaaaaagttttgtttctattcagggtttcncct

SEQ ID NO: 349 - DNA, 379 bp, Homo sapiens
  misc_feature (1)..(379): n is g, c, a or t
tttactttntatnagtcactgcaaattttcttccctcctctgggatctaaggatccagggaggaggctgccacagtgaagcagaaaagctacattctgcccagggaggaagagaaaaagcaatttctcgctccccttcccaagtccttcctgtccaccaccacctcggatgtccccgcacacagccttccggtgagcggccgtgctcnccctcctctctctaaggcattggggagcagagggcccataggcagcaccctgcaaaaaaaaaatgatctacgtgtgaggagagggcaaggggctggatgcaggcagagaatgactttaagaaaagattctatggatcccttcctttagtatggagctcgattttccagctg

SEQ ID NO: 350 - DNA, 358 bp, Homo sapiens
  misc_feature (1)..(359): n is g, c, a or t
ttccgtctgattttaggttccaggaacttcctgagaacacccgatcgcagagggtaattttctggagtttgttttgcagggatagctgggagtatggccaccctgctccacgatgcggtaatgaatccagcagaagtggtgaagcagcgcttgcagatgtacaactcgcagcaccggtcagcaatcagctgcatccggacggtgtggaggaccgaggggttgggggccttctaccggagctacaccacgcagcttgaccattgaacatccccttccagtccatccacttcattcacctatggagttccttgcaggagcaggtncaaacccccaccggaccttacaacccgcantcccc

SEQ ID NO: 351 - DNA, 285 bp, Homo sapiens
  misc_feature (1)..(285): n is g, c, a or t
gngaccgcggcgagggcccggcagcccgcctgnnatgatgtgggactgcgggttgtaggtccggtgggggttgacctgctcctgcagcaactcataggtgatgaagtggatggactggaaggggatgttcatggtcagctgcgtggtgtagctccggtagaaggcccccaacccctcggtcctccacaccgtccggatgcagctgattgctgaccggtgctgcgagttgtacatctgcaagcgctgcttcaccactgtggttggaaccgcggggcagggccaaaa

SEQ ID NO: 352 - DNA, 321 bp, Homo sapiens
  misc_feature (1)..(321): n is g, c, a or t
cataattctagtgtctgttccaaacgcactgtgtcacagaagctagaattaccattagaggcacaaacccctgagaatacacaagggggcacgcttccagtagatgtgttgnnnnnggaggagggcagaggggacaggggacaggattcagctttgtggtgggtcctgagggttcctaccaggggtagccaggatctgggaaacagatcagcgactctagtctgaagtggctgcctggttcgggggctgccttcagcaatgattcactgcacngagagacggaaatagccaccttccaaggccgtgaagtcctggaggata

SEQ ID NO: 353 - DNA, 486 bp, Homo sapiens
caacaccctttattcagcaccaggaatacccttcgcacagaaccagcgagcttcacgtgctcagcttccccgcggaaatgctcacaggatgctgcgggacccccggcgtgccacacgctctagtggtggtgctgtctgaactggagcccacagtaaccgcatgtgccggtttttgtttctttgtccaagtttatatacacttttgggtggccaagagctcccccgccgccatcgcacgctatcacccgagtctccacctcgctcacgggctgctctgctatcaaatcaatggcaaagttttcattcacctctttctgacgacctacaaaccgaattctcctgtagtctttatcatcataaacctggccagtgtgcgtgaccttctccccggtcggcgagacccgcaccccgaaacacctggcgcccaggggcaggctccgcgccgcctcgccacacggttcagcagccggcagaaggtcactcgtg

SEQ ID NO: 354 - DNA, 479 bp, Homo sapiens
  misc_feature (1)..(479): n is g, c, a or t
gaccttctgccggctgctgaaccggtgtggcgaggcggcgcgganctgcccctggngccaggtgtttcggggtgcgggtctcgccgaccggggagaaggtcacgcacactggccaggtttatgatgataaagactacaggagaattcggtttgtaggtcgtcagaaagaggtgaatgaaaactttgccattgatttgatagcagagcagcccgtgagcgaggtggagactcgggtgatagcgtgcgatggcggcgggggagctcttggccacccaaaagtgtatataaacttggacaaagaaacaaaaaccggcacatgcggttactgtgggctccagttcagacagcaccaccactagagcgtgtggcacgccgggggtcccgcagcatcctgtgagcatttccgcggggaactgagcacgtgaagctcgctggttctgtgcaagggtattcctggtgctgaataaaggtgttgctgt

SEQ ID NO: 355 - DNA, 406 bp, Homo sapiens
  misc_feature (1)..(406): n is g, c, a or t
nnannatantattcccagcttttttgtggnataatgcgcagaaggnaatgaacacattctacctgcaagcttcttcctgtgcctttggaatctgctcctgccagtctgcagggaaccacggatctgctttccgtcacgtaggaggcattctcgacaccctctgtacacagcatgcgctttatttggcttctcttacgcagcgtagtgactttcagatttattcaagctgctgcgtgcgccaacagtccactccttcctagtgctgaggcccccatcacatgagcacaactgtttcttgtgtgtgatgtgttgttctctgggctgtgcaaaaagctgattctgtcatcaccgcatcttgtctcatcagtaggagtgaatgggctgggggggacagtgggcacagtca

SEQ ID NO: 356 - DNA, 91 bp, Homo sapiens
  misc_feature (1)..(91): n is g, c, a or t
tctgaagacgtttnaccggggaatggtctggaacacggacctggtggagaccctggagctgcagaacctgatgctatgtgcgctgcagacc

SEQ ID NO: 357 - DNA, 612 bp, Homo sapiens
tttttgaaatcaaatagtagatttattggctgtctctgtaatacaatgtggtgaaaacatcttaattcaggacatcttccaccttgttttggcttccagttgtactgcaagaccagtgtcaggcacataggctgattaatcagtggacaacagaagcaaactgctgctgggttacatgtctacgtgatccattccacagttttaggaattttttttctttcatagcatcttcctcttttcaaattccttgtagatcgtggttcccagctgtgcaggagacatactgaccacaactcctgcactctgaagggcagagatcttctctttagctccaccttttcctccagcaataattgccccggcatgacccattcttctcccaggaggagcagttaaaccagcaatgaaggacactacaggcttggaatttggacctgaattatgttgcttcaaaaattctgcagcattctcttctgcattaccaccaatttcaccaatcaatatgatggcctctgtggcagaatcgttcaaaaagatttcgaggcagtcaataaaatctgttccattaaaaggatcacctccaatgccaacgcacaaagactgccccaatcc

SEQ ID NO: 358 - DNA, 429 bp, Homo sapiens
aaaaggaaggattggcattgtgtccagatctggcaccctgacttatgaagcagttcaccaaacaacgcaagttggattggggcagtctttgtgcgttggcattggaggtgatccttttaatggaacagattttattgactgcctcgaaatctttttgaacgattctgccacagaaggcatcatattgattggtgaaattggtggtaatgcagaagagaatgctgcagaatttttgaagcaacataattcaggtccaaattccaagcctgtagtgtccttcattgctggtttaactgctcctcctgggagaagaatgggtcatgccggggcaattattgctggaggaaaaggtggagctaaaagagagatctctgcccttcagagtgccggaggtgtggtcagtatgtctcctgcaaagctgggaaccac

SEQ ID NO: 359 - DNA, 120 bp, Homo sapiens
tttttttttttttttttttttttaagaaaggatgtttattcaggcctgatgcctcgatacagctagatgtacaaaaatatatcattcaaagtcatgaaaaccatcatcatattggtgtga

SEQ ID NO: 360 - DNA, 463 bp, Homo sapiens
tgaagccagcagccccgcatcatgtcaaagctcggccgggccgcccggggcctcaggaagcccgaggtcggcggtgtaatccgggcgatcgtgcgggcaggcctggccatgcccgggcccccactaggcccagtgctgggtcagagaggcgtttccatcaaccagttttgcaaggagttcaatgagaggacaaaggacatcaaggaaggcattcctctgcctaccaagattttagtgaagcctgacaggacatttgaaattaagattggacagcccactgtttcctacttcctgaaggcagcagctgggattgaaaagggggcccggcaaacagggaaagaggtggcaggcctggtgaccttgaagcatgtgtatgagattgcccgcatcaaagctcaggatgaggcatttgcctgcaggatgtacccctgtcgtctgttgtccgctccatcatcgggtctgc

SEQ ID NO: 361 - DNA, 327 bp, Homo sapiens
ggcaggttaaaactgctttattattatttttttaacatagaagaagcttggtagtggacatgtggccatttgatgtttttatgactaagagagttcaggctcaatctcttacagaatgtaaatgtacccctatgcatgcatatgtaattcttatcaaaattaagcttaatcactaaaagaagattcgctatctgaactttcttctacagttttctcactttcgccatcaggcactgggagcatctggcctctcaagaagatctgggtctagtccttctgatatcattttgtgtcttattgccatcactggtacacccacttgaacca

SEQ ID NO: 362 - DNA, 427 bp, Homo sapiens
ggatgggcttctctcatggggtcaggcatagacctgaccaaggtgccagctattcaacagaaaagaacggtggcttttctaaaccaatttgtggtgcacactgtacagttcctcaaccgcttttctacagtttgtgaggagaaactggcagacctttcacttcgtatccaacaaattgaaacaactctcaatattttagatgcaaagttgtcatctatcccaggcctagatgatgtcacagttgaagtatctcctttaaatgtcaccagtgtcacaaatggagcacatcctgaagccacttcagagcaaccacagcagaacagtacacaagactctggactacaggaaagtgaagtatcagcagaaaatatcttaactgtagccaaggatccaagatatgccagatatctcaaaatggttcaagtgg

SEQ ID NO: 363 - DNA, 239 bp, Homo sapiens
tgaagttcatcatctttagacttaaggaattaacaagggtcagggagactacaccaggctgagggcttcttggttcctggagacatgcccagctacagcaaacacagggaaacacgaagggggcagctggaagatttggtcttgaacttggggggtgggtaagtgatgatccccacgactggagcagcaggaagaagttgtgtctgaggaagtgctgggccgcccagagggacagccct

SEQ ID NO: 364 - DNA, 284 bp, Homo sapiens
attcggaacgagggtttcccttccctcccggcgacaactccagggcagggctgtccctctgggcggcccagcacttcctcagacacaacttcttcctgctgctccagtcgtggggatcatcacttacccaccccccaagttcaagaccaaatcttccagctgcccccttcgtgtttccctgtgtttgctgtagctgggcatgtctccaggaaccaagaagccctcagcctggtgtagtctccctgacccttgttaattccttaagtctaaagatgatgaacttc

SEQ ID NO: 365 - DNA, 425 bp, Homo sapiens
  misc_feature (1)..(425): n is g, c, a or t
gagatggagttttgctcttattgcccaggctggagtacaatgtaatgaggcctgatagttaaaaaatcaaaatagagtcctggtgtgcattttaactttgcagttaatgggactggtgattttttccttgttaataagcatgttatataatgttaatcttaactagaggtcctcctgctttatcttaactagattcgtgtgagggatgacaagatgcctttgngcaccttgcaatagctgttgaagctgttggttgggcacatccagatacaatctttctcatggttgcaaacacgctgattggcaactgggatcgctcttttgggggaggaatggtaagtgattttaaaagaaattttccntaacagatggaagattatcatgttttcntaaatataagttccttgtaagaatccnttttttaa

SEQ ID NO: 366 - DNA, 471 bp, Homo sapiens
  misc_feature (1)..(471): n is g, c, a or t
actattaaaattaggatattaacattgacatagtacttctagctaattctgtccttattcaaattttgccactaataaactttgtggcaaagaaaaaaaganactttttctggcccacatgcaatccaggatcagtttatatttttaagtcagaattcacagtacaagactctattctgccactttaaaaaaggattcttacaaagaacttatatttaagaaaacatgataatcttccatctgttatggaaaatttcttttaaaatcacttaccattcctcccccaaaagagcgatcccagttgccaatcagcgtgtttgcaaccatgagaaagattgtatctggatgtgcccaaccaacagcttcaacagctattgcaaggtgcgccaaaggcatcttgtcatccctcacacgaatctagttaaganaaagcaggaggacctctagttaagattaacnattatatancat

SEQ ID NO: 367 - DNA, 434 bp, Homo sapiens
ttaggtgtcaacaaacttgtttatatatatatatatatatatatatatatacacatacatacacacacagtcacattccagtgtgacaaatactccttcaccaggagacagcgctaccactccgggatcttgaagactctctacagagagcctaggcctggcactctccacagatgacacccaacagggagcacgtttattaaagtgggaaggggtggggtacacccagggtgtatactgacagggacctcatgcaggcccagagctctgctgcaccctcttcatcagctcttcatcctgcatagacaactctgtcaactttttgcccatccgctcatggatgtccaggtacttagagacacatcggtccaggcacacagactcgcccttggagagctctgcttccttgtagtgaggaggcacacacttccggt

SEQ ID NO: 368 - DNA, 408 bp, Homo sapiens
aacatttaaaaatcagtatttaattacaaattatatgttctacagtccagcaatacaaagtgttgcattagtaccaccaaaaccaaaggaattggtgaggccaataaatcttttctcagttttccattcctgtgcctttagtggaacatagttgagatcaaattctggttccgaacaatccaggtttaaagtaggtggtagtttttgataataacaagctaatgtggtaaaagctgcctcgactgcccctgcagctcccagcagatgtcctgttgctcccttagttgaggaaactgcaagggcatatgcatggtctttgaagagatgtttgatagctttgttttcagcagcatctcccaatggtgtggaagtagcatgtgcattgatataggatatctcctcagggct

SEQ ID NO: 369 - DNA, 434 bp, Homo sapiens
  misc_feature (1)..(434): n is g, c, a or t
cctacatttgtttcacataagccatacagataaagagacttttgttaaaattaaacttagtcctgataaatgtcttttcttgttttattaggtgtatggctgctgctttaaaagatgcaggtgtgcagcctgaggagatatcctatatcaatgcacatgctacttccacaccattgggagatgctgctgaaaacaaagctatcaaacatctcttcaaagaccatgcatatgcccttgcagtttcctcaactaagggagcaacaggacatctgctgggagctgcaggggcagtcgaggcagcttttaccacattagcntgttattatcnanaactacnacctactttnancctggattgttcggaaccagaatttgatctcaacttntgttccactaaaggcacaggaatggaaaactgagaaaagattttattg

SEQ ID NO: 370 - DNA, 290 bp, Homo sapiens
  misc_feature (1)..(290): n is g, c, a or t
gcatttttattaaattgaaacaagttgttgattcgataattacaagacttgtacaaaaattcacagcgcctgtgaggagcctttggtgggaactggggacaccngtgcctctccggacagaggaaggaagtcccaccccgccttccagcagcagcgagcctgtgtctggcattccctgttccgctgctcccancctcantgtggggcagcagttctttaggnacattcagctgtcaaaggggaggaaccagcccccacaggccggggcctcgnaggcttaaaggggcact

SEQ ID NO: 371 - DNA, 316 bp, Homo sapiens
  misc_feature (1)..(316): n is g, c, a or t
caagctgaaggcccgcttcccctgcaaggccatgttcgaggaggcctacagcaactactgcaagaggcaggcccagcagtagggctgcgggcacgccagggncggctccgcgggaactctctccctcagacaggccaaaaaccagtagcgaggtcgtggtgatgctctttttaactcctttgcccaataaggggggtngctgcctggagccccgtagccagcgntttccacggtttctgttgctaaatggttgtagggtnagaagtgcaagaatgaagatgaagccccactggttcggttcagtcttncctccgtg

SEQ ID NO: 372 - DNA, 481 bp, Homo sapiens
  misc_feature (1)..(482): n is g, c, a or t
aatgctaatgataacccactaagctgattttgtgacccattaattgtcttgatccagtttgaaaaactctgaattataggctgtgagcactcgctattgttagggttaggataatctaataagcatgaggtaatggctgatgcaaggaaaagactggttaatccagaatggctgataatttttcaaaaagggaaacaaagctggcaataaagggaatggttagcaggaaagcaaataattgaagacagcaacagatgtaggtttgttgggagcgtgaggctccaggaataaataggtggagagggcaatgggcatggtggggctctcacccggatgggnatgatgtggctggggcaggggatgacaggaaggcccctgtccatgagtagactggccatgtgcttgacattgcgctggtgggctcgctcagggcttggacacctctcccttgagcagccgccagattctagagctccagaga

SEQ ID NO: 373 - DNA, 434 bp, Homo sapiens
tttgaaattttaaggtcagtttattaagttcaatgatgaaagctatcagaagaatattctcctgaaaataattttttcttagaaaaaaagaaaggaaaatcataaccctctgagcatagccacagatgctgtggcagtcaagcctctctgcagatggggacagtccattagtcagctgagtcactctctgggtcagcaggattatagtctggatcatcttcatcatcctccagctccaagtcatccatttcttggaacaaagactcatctacctccacgttgtttccagcatcctccaagaactggatatcagatgtgtcaagattatgatctgtttcaaatagttgtttcccacttaatttattttttcctgcttgttcttcttctttcatccttttctttttaatttccaagagttctgcatcaaacttggc

SEQ ID NO: 374 - DNA, 415 bp, Homo sapiens
cagttacaattgagaatttcttaaattggaaagccaagtttgatgcagaactcttggaaattaaaaagaaaaggatgaaagaagaacaacaagcaggaaaaaataaattaagtgggaaacaactatttgaaacagatcataatcttgacacatctgatatccagttcttggaggatgctggaaacaacgtggaggtagatgagtctttgttccaagaaatggatgacttggagctggaggatgatgaagatgatccagactataatcctgctgacccagagagtgactcagctgactaatggactgtccccatctgcagagaggcttgactgccacagcatctgtggctatgctcagagggttatgattttcctttctttttttctaagaaaaaattattttcaggagaatattc

SEQ ID NO: 375 - DNA, 332 bp, Homo sapiens
  misc_feature (1)..(332): n is g, c, a or t
ttttttcagtttctctatgcagtccttgtttcctgccatttaattttagatgaaaatgagacatatgagtacactgaaaagtaacatcaccatctggaaaattatacataaggaaaatgcaataagggaatatagatccttcagcccctattccagtactctttaacaactctgcttccttggacgggaattcatgaggtataatacttaaggagattttcatctgtaggttttaggattttcttatcggccatattcaccacccatcctggagcaagaccaaagaaaatctgccttggatccttccnagtacagagcatttttgaagagtt

SEQ ID NO: 376 - DNA, 419 bp, Homo sapiens
tacaagaggtatgaacatttgtagggttccacatttgcatctagaaatccaatgctctttagaatgttattacgaatagaaagatggccaggatgacctttagtgttacatgttcagcaaattttaattcaaaccttgatatgcctggacactgaaaagtaaacgcatcacctcctattttataccctaccttctggttcccaattgggagagcacatagagggaaggagacaatatagaaactacggagtccgctggtagtgggctgcatggtgtgacagagccccttctctgtaaaatggaaatgacaccacttagccatctcaatagtttacaagaattaaaagagatacagtacctgaagtgcttagcgcatgggtagcatttcataaatgtttagtggtccatactaatgccct

SEQ ID NO: 377 - DNA, 405 bp, Homo sapiens
tttttttttttttttttttcctgaagtgatgtttaaattttatttaataaaaatacagttttctttttaaatcaacaaataacattgtttttcagaaatctactcaaatgctgctccttagttatggcttaagagctacccaaagacttcagtgggtaggctgaggggaatagaaatgcagaatccttctttcagtagcctatatacagttatctcctacactcactacacacgtttgggcatgtagaacttgccccagtatttccccttgtgggtcaagtcatatgggctcagtactttccgtatgcccagcatgttggcagtggctattcgctcaaatgtccaggggttctggttgttacgttctctttcctcttgatcttttcgcatcttctctagagtccc

SEQ ID NO: 378 - DNA, 504 bp, Homo sapiens
  misc_feature (1)..(504): n is g, c, a or t
ggacgcccgtgaccatgtggaggctgctggtcgcgcatgccgctcctgggtgcccttgtcagattcctgggcactcctccccgccagtgctggcgtannaagacacatgctnncccnangnttaaanccnccaaaaaannggggtttnttttttttgaagatgtttccattcctgaaaaacccaagcttagatttattgaaagggcacacttgtgcaaaagtaagaagagaacctaaaaatttaagtgacatacggggaccttccactgaagctacgggtttacagaaggcaattttgcaatcttggcattgggtggtggctacctgcattggggccactttgaaatgatgcgcctgacaatcaaccgctctatggaccccaagaacatgtttgccatatggcgagtaccagcccctttcaagcccatcactcgcaaaagtgttgggcatcgcatggggggaggcaaaggtgctattgaccactacgtgacacctgtgaaggct

SEQ ID NO: 379 - DNA, 489 bp, Homo sapiens
  misc_feature (1)..(489): n is g, c, a or t
tttaatcttctccnttacaaaagaattttatttatactgcactgattcattccttcaaacacatagcttctaacaggtggagttagaaaagcgggtgccacaaactatggtttaatagtatgcaggccctgtacctgtttatctaactatacctgaaatttgctgataccccaagccagctacttacactaaaggcatctctggggggcatcatctagatgaagtctttaacctgatgggaatatctggttattctacagtttaaacaggatgtttggcttatgcttttgttcagctgactggtgcatgggaaggattaaagcccatatctaactacagcaggtcttcaagcttattatcctgtcatgaggttcataaagntgacaaactcatcatttggggagctntaagggtcaaagtgggccagnttgcaactgcgctggttacactntgccaanttccagtcaactgtcttgtaggggccttggg

SEQ ID NO: 380 - DNA, 355 bp, Homo sapiens
  misc_feature (1)..(355): n is g, c, a or t
tcacctagttgactcagccctcgatagtctagagcccaccccctcctcaggaactcaagagctcagcatttataatgagcagttggtaatgagttgccctatgtgcttgtcgcaagcagtcacagagatgagccctattacttgatattcaggaacaaaggtacctgaacattctgataattatctcagcatacttgaggtttccttttttaagtgttcgaggttataacaagagacagccaaggacctacaagacagttgacttggattttggcacagtgttaacagcgcagttgcattctgggccattttggaccttatagctcccaantgatggagtttgtcnttttntgga

SEQ ID NO: 381 - DNA, 466 bp, Homo sapiens
tttaaattaaatagcatgatttaatttagttggtgcttaaccctgaatcctcttaagttaaaaaaaaagttataattaactattaacgttaatgaatttaaaccttccagaaagcatgaatccaaaaggaaatgtccaacaggtgatatgaaccagatattttatggcctttcctgtttcagtctcaaactttctaaacatcaatggggaaaaaaaattctctagagtttttcagttttattcttctagagcacaattttccggcctgttactgagtacggtcttctaacaggtacacaattaactcataagtagacaacacaatggcagtatttgggatctgccggataagctgggcaaacagtcctctataaaaggcaaggtagccttcttcccggaacaccaggcgcgccgtctggacaaaagacttgtacttggtgccctcttcccggagcctcgtccttat

SEQ ID NO: 382 - DNA, 456 bp, Homo sapiens
  misc_feature (1)..(456): n is g, c, a or t
tttttntttttttttnntttctttgtcagaaaatatatttattattgatagtgagtgaagtaaagatgtgagtattcactatagaggttttatcagccaaggtngccttcatattgataaaaataccttatctcacttgtaatcataaacattattccagtagaagaggtacattttctctcctttttgtcttcttgcctgtataatcaccataataagttataatgaaatagctcttacataatcaaaggagaaaagaaagacaaaaccaacatgccacagcctagacaattccatccagcactgctgcctccagatctgttttctggctctctccacccagcactgctgccctccggatctatgttttctggctctctcctcgccccactccaattaatttngcccccaaccccatccnacttggttagggtggaggttcancaaatggntggg

SEQ ID NO: 383 - DNA, 443 bp, Homo sapiens
  misc_feature (1)..(443): n is g, c, a or t
ttttttttattcatacatatttattcacacaccacacacatataatttcatgtacattgtttgaatgtcccaaactttggagtttaaacatatatacacataagtttattttctcaagtcttactttgatgtagaaaattttattcttgattgatcgagtaaggagaaagtgtttatctggcatagagaaaagggacagatagcaaaagggaatatgatgatactataacattactttcactaattgtcttcaacctcattttgattttacagatttggcctctgagtgattttggatttttacgtgccagccctaatggccacagattttctgatgattagtaagcatttattcntttgacttggattattgncccccctttccatgnggaatttattaccccccgttggaaaccggngtaccttacccaataaaccggtgg

SEQ ID NO: 384 - DNA, 422 bp, Homo sapiens
  misc_feature (1)..(422): n is g, c, a or t
gtgagccgaggttgtgccactgcctagcagcctcgggctacagagagcaagactctgtctcaaaaaaaaataaaataaaataaataaaaaaagatatagtattaatgcctgtatttatgaagacagggccattgcactgctgctatgctgaaatgaacttttataaagtattattgactatagccaactacagatggcatatgccttaaagatgcatttttctatgtatttaatattttgtgtacagtaaaagtcagaactcatttaaagaactttaagggatcctttagaaacatttttacttaatttcaaatgagtgggctgagcatgtagactagcagctttttatccaacctnggcaattgtccaggttggacctttttaaattccgattaggtacccncccccgggccttngtaaat

SEQ ID NO: 385 - DNA, 454 bp, Homo sapiens
  misc_feature (1)..(454): n is g, c, a or t
cttaatggggggttggcagttgattatgttctggatgattccgtctatatatgtgtgaataatgtaagtattttacagcttgttgatttttaaattaacgtagtaaatgctgtaaaatagatttatattcagttaaccgctttcagttgattttttgaaagaaacaaaggttaaatgggggattaaagtaaaattgagagaccctttaaaccattgtcagcatgcacaatgcctctgattctggcagttttagaaacttggtggcacttattaatcctcttggcccctttccactctaatgggatagtgtacattcttcttaaagtcccccaaccagcnggattttccttgcnggtaaattatggccggatgccaaaatanttcctaattggataatatggtggttggggaggcccgagggatttggatggggggntgtggggcccnggccaag

SEQ ID NO: 386 - DNA, 427 bp, Homo sapiens
  misc_feature (1)..(427): n is g, c, a or t
ttatttcagganatactatgctctggctccaagtcttacatcctttttgaccctttagccacatgtccttcacgagaaattttaagctattttaatactcccatatatcacacttactctacctttatttgggtttnacatacaagcaatctgcactttgattttaaaaaagttctaaaattttttaaaggatggggtcttgctatattatagcccaggctggagtgcagtggctattcgcaggtgcaatcatcatggcacattacagcctcgagctcctggtctcaagcctcttgcctcagcctccctagtagctggagactataaatagtatatacagtgccactgtaccctctatcctaacattnttttaaaaggttcaccanttaaattagttactaattntttataggagaatagttcacag

SEQ ID NO: 387 - DNA, 427 bp, Homo sapiens
ttttgaatgtaatatttatttggtgaatttacatgtgaggtcatttacaaaagaaagatacagacagatgcagctttcagtgcagtttcaaacattttcacaacaggcaatagtccatgagaatttggaatgacagtatagaatggcacatgcttcagtttcctttgtgtttctctacccaaccccaagatgaaagaagggagaagagtagaagaaaatgtcagtgttaatgtaaatacagccatgcaaataaaaacttttttaaagtcagaggtcattcagagatgtagaacatttctgtatttgggggttatcagaaggtgcataatttaaaaacaaaatgcagcggtctcaaacttcccatcatccaaatcatcttgaattatattaactgcaccaactaattagtgacctcctcaatattttc

SEQ ID NO: 388 - DNA, 381 bp, Homo sapiens
  misc_feature (1)..(381): n is g, c, a or t
catntcacccccatcaccaattttgagggcagccagtctcaggaccacagtggaatctttggcctggtaacaaacctggaagagctggaggtggacgattgggagttctgagccctctgcaaacctgtgcgcattctccagccagggatgcagaggccacccagaggccccttcctgagggcggcccacattcccgccctccctggnacgacttgggtagaaanggacattcttccaggaaagttgactgctgactgattgggaaagaaaatcctggagagatacttcactgctccaaggcttttgagacacaagggaatctcaacaaccagggatcaggagggtccaaagccgacattcccagtcctgtgagctcaggtg

SEQ ID NO: 389 - DNA, 435 bp, Homo sapiens
  misc_feature (1)..(435): n is g, c, a or t
ttttttggaagggagagttcagactttattagataccttaaggctggccctggggaaaaccgtggctggcttcaccatcctcctaataggaagaggcagtgaggagaacagtagtctggggaaggtgggagccccaactgagggnctgcacccagcccctcagatccgcctcccctcccatgtcactccagctcttttgggatgatcacatggtgagaatctgctttgaagatatgaagggcttcatggaggcttccaacggcagactggtagtcctgcagcgggacctgggagcaggcaggggctgtgagctggcctcggcggatgagatcgcacagttgtgaggatcagctcctttgaaactcggtctggactgtgatccntcttccactgggacaaccaaaagcctcgaagtttgagatccttaaaaaatga

SEQ ID NO: 390 - DNA, 416 bp, Homo sapiens
  misc_feature (1)..(416): n is g, c, a or t
gtgacagactgaagagtctgggggctgagcatgtcatcacagaagaggagctaagaaggcccgaaatgaaaaacttctttaaggacatgccccagccacggcttgctctcaactgtgttggtgggaaaagctccacagagctgctgcngcagttagcgcgtggaggaaccatggtaacctatggggggatggccaagcagcccgtcgtagcctctgtgagcctgctcatttttaaggatctcaaacttcgaggcttttggttgtcccagtggaagaaggatcacagtccagaccagttcaaggagctgatcctcacactggtgcgatctcatccgccgaggccagctcacaagcccctgcctggctcccaggtcccgctgcaggactaaccagtctggccttggaagcctccatga

SEQ ID NO: 391 - DNA, 682 bp, Homo sapiens
  misc_feature (1)..(682): n is g, c, a or t
gataagttggtgtaaggctatgtgacttgatcaaaacagatgcagggcctctaaataaaagggatcatctgaaattaatgttgtttgaaattactatctgattttgagggttccagtatttctgtgaaaattcaacaagaactccttggaaactggtattgatattcagtctccttaaggtagatttttcaagcttttcatacattggaactccacctgactttggaccaaccccagaacagagcagagccacctcctatagacgcccattgccctgctgctgtacacttcagcagcttgcacaagggagctcacttaaaaggagaaattgtgtagttttaaaatatattttgtgtaaaataccttactatgctataaaccaccattaaaaaccagtgttttgatttggtacttaaatatttttggagtgaaaattatcactaaagtaacatgactccaacaaaagtatggtttcattataanagagtactgtattgatttgccccagttttgtacttagtaaaggnattaacttccttggatttggacttgtgatttagtatgcngtatcgtgggcngggttaggttactgaaaaaataaagtcttacctgagttttgcagtgctctacttaaccgaagacagctgtccacctttagctttacattggcctactnaaattt

SEQ ID NO: 392 - DNA, 411 bp, Homo sapiens
  misc_feature (1)..(411): n is g, c, a or t
gtgtacaagaccctttacagcccgcctctgtgtacccttcaacaccattctctgaaccaaccatgctcatgtttttacctcagtgcctttgcanatgctattccctctgcctggaatgccctgtgccccctctgccctctgccgtgctaaaatatcactcatccttaaacttcaaaatcaagtgccatctcttccttgttaccttcaggcagaattaattactctttcctctgtgcaattgttctatatcttcgctctagctcttttcctgttgtattgtaatgatttgtttatgtttaccttccttactagactgtgagctcaagagcacggccgtcttaattattcctttctgtacccctatgtgtcttttatggttctcagccccttataacaggtgctcaataaata

SEQ ID NO: 393 - DNA, 502 bp, Homo sapiens
gcgtccgcccaggtgcccgcgcccgtcgtgatggaggcggcctgctggggctgtgtaactggagcacgctgggcgttgcgcgcgtctgaagctgccgcagatctccgctgtgctagcggcgcgcacgcgggcactcagccttccgagtttacttctggagctggcaggattcctggtgtttctgcggtaccagtgttactatgggtatccgccgctgacctacctggagtaccccatcctcatcgcgcaagatgtcatcctcctgctctgtatctttcattttaacgggaacgtgaagcaggccactccttacatcgctgtattggtgtcttcttggttcatccttgccctgcagaagtggatcatagacctggccatgaatctatgtactttcatcagcgcggccagtaagtttgcacagctccagtgtctgtggaagacgagagactcaggaactgtgagtgcgctgacttggagcctctcttcctatacctgtgcaatt

SEQ ID NO: 394 - DNA, 415 bp, Homo sapiens
tcaaaatatgaaaatttattttgcataggaaacaataatctctggtaaacatcattactgcatctaacaaaacaatgccttcaattaaagggggaaagtgagtttttaaacattagggttaatttagaagaaaatacagtatataataatctcaacatcatgtttagggtaaaaatgctataatgtgaaaaaagtccctaagaactggacagaacctacctaacaacaccatttaccgtgtatgttttcaatagacaaaacatattttgtaccaaattccaacagtggtaattctatagttgtggccctttaaaaaatggcagcattgtacttgaatcagaaagcttactgggatttcctcatcgaaagtagagattgcagctaatcctagtaccttttgttagtaattacttaa

SEQ ID NO: 395 - DNA, 372 bp, Homo sapiens
tcccacaatgacatttattaataacatttctggcaaaaacaagtaacaagttcaataactgaattcacatcaacaggtttcattttgatccattagccaatttggaaaaaagccatattgatcaaagggattaaaattaaaaagcaccttttccttgctacatatagattctttaaactaaaactccaagcagggatcagatacaaaacccaactgcaggattgtttttattgactatgacatggacttgttgcttacatttttttaaagtcatcatttatacagttatttaaactctattgggcagaaaactgaaaatacaattgtgagaattatactccatagtaaatacctatgtacttaatactgaat

SEQ ID NO: 396 - DNA, 189 bp, Homo sapiens
agctgaatttatactcctgaagccacttcatctttaggctttatatttacagtgttgtccaggaggaactaaagaaaaaagttacactaattattttctttagttcctcctggacaacactgtaaatataaagcctaaagatgaagtggcttcaggagtataaattcagctaatgtatttctatattat

SEQ ID NO: 397 - DNA, 282 bp, Homo sapiens
tttaaagctataattatttatttccaaagagtttaaagattaaacttccctcaaaacaaacaaaaggcaaggtaacatcccaagctgtgaggggctgagtctctcctaggtgcagggcagcacaggaactggctgcacaaggccagagaggttacgtggcggctctcttcaaattagaccacacagagcgcttcattccctgtgcagtcttcacatcttcccagtccagtttgacgtctggaacctcatcttctggctctggatccttcctcaagggccccc

SEQ ID NO: 398 - DNA, 240 bp, Homo sapiens
  misc_feature (1)..(240): n is g, c, a or t
ggcacaggtaaagaaaacagaagtgtgacancanctttcaggtttcccaaacagctttcaatgataaagtncaataaataaagtacagcactttaattgcagggaaaaaaaaatgccagactttagaggtaaaacagtacaggggccaaggaccaaaaanttttatttgggaacattcagaggttagganaggccantgttcccgttnttccagaggcctntgaggaaggttaactgagg

SEQ ID NO: 399 - DNA, 373 bp, Homo sapiens
  misc_feature (1)..(373): n is g, c, a or t
ttatgaggaattccagttataactggcttctttggtggaatttgagatacactctcttctctgttaagcaaatactgcagattacaaatatttcagttccaggtatgaagaaaacatgaggcaccaccagttacatccggtgatcaaggctttcctgtgtggctccatcagtgggacctgctctaccctccttttccaacctctggatctccttaaaacacgcctgcaaaccctccagccctcagatcatgggtctagacgtgttggggatgttgggctgtactcttgaaggtggttcgcacgggagagtcttttggggcctttgggaaagggatgtcccctttccattgtggagatgtgtccnggggcttgg

SEQ ID NO: 400 - DNA, 371 bp, Homo sapiens
tttgaaagggaaaaaaaatttattaggtccaggaatcaaagatgacttgatagaattatgaatacatgcagaattggatggttagaaatgaaatcaatctatttaggtccagcctaaggttctgatagccaatcagtagacacaatcagagtagtagtattcctaagaaaccaggataaatctccaatgtgcatgagtttaatgaaccagatagattattgtatcgccaatatccacccttatcccattctcagtcagatgaattttcttgctcatgaggtccacattgaaaacagcatgctcagaaatgggggtcttctcggtgtactcctttcccaggacaggaactcgtcgaggccccaacagtggat

SEQ ID NO: 401 - DNA, 451 bp, Homo sapiens
  misc_feature (1)..(451): n is g, c, a or t
tttttttttttttttaataaaaaataaagaaactttcatttatttgctgcagacctgaggatgtgatttaatcactcaacagacactaataagtgcacagtgaggagcacgcactggactcagcgtgcgatgaggaaggcgctaccgctgtcctcaggatccacgggtgcaggagcggggaaaaacctggtcggtgctgagaggagactggaggcacggggacgtgttacttgagactggagggagtggctgagcccagagctcactggcccctccccatcctcagacagaggagtgaagcaacgtttctctgggtggtttctggctccctgggtnctcatggtcaggactttctcagctgggaccaaacattttttgggaaantttcttttgatggccancctagncagagtgggncattnggggatcanaaccttngagggtttgaatc

SEQ ID NO: 402 - DNA, 497 bp, Homo sapiens
  misc_feature (1)..(497): n is g, c, a or t
ggtttggagtaggacctgcggcgtgctcgagactccgacttcggtcttgcggcgcgctcccgcgngagccatgcccactgactctaagtgggcactgcccggctccgggagggcgagaccgagcgccggccatgggaagcttccagctggaagactttncggcgggctggatcggaggtgcagccagtgtcatcgtcggccaccctctggacacagtcaagactcgcctgcaggctggcgttggctacggaaacaccctcagctgcatccgcgtggtgtacaggagggagagtatgttcggcttcttcaagggcatgtccttccccctngccagcattgccgtctacaactccgtggtgtttggggtcttcagtaacacgcagcggttcctcagccagcaccgtngcggggtagccagagggcaagttccttncccgnaagctgttcagaacttgttntgggncagcatggttggccgtgtggtntctgttcggggt

SEQ ID NO: 403 - DNA, 431 bp, Homo sapiens
  misc_feature (1)..(431): n is g, c, a or t
tttttgttatgtcttgattcaggataacttggccaagtcctgtgacttttacttatttttatttactttttctttctttctttttttctttctttaagtggtgatggagcttctgtgtggaagagtttggtgctttgaagcctagagcctgcttattccctctggtcactctttgccccatttcctatagacttacccctgtccccaaacacagcaccaaacaccccattatcaagatcaattcacatgacctctgagacactgcccagagctcactggagcacagtctgactagcctagtctttgtaaaggcagaaggacatgtggggcatgatggggtggggtgggcaatttgtaagcttcactggattctgtggggtgggcattttttttcttacagggaacaaagtgttgctttcaattgactnttt

SEQ ID NO: 404 - DNA, 535 bp, Homo sapiens
  misc_feature (1)..(532): n is g, c, a or t
ctcttgtgtcaaatcctcgaacaattgcacccatcgactttnctgcgcntgcagagagcaagcccagcaacaccaccaccaactatcagaatctagaagacagacccagttatgtgttaaggctcattatcaactaataatgaaaaatcatcagctaacaattattggtgcctagtataagtttagcatcaataaatggcggtgcagatggtgataatgatgatcagcccttagtaactgtatggagtacatagactattctttaactgaaccaccactgatcttgaaattttatcaaagaaacaactgctagcaaaggccaacaacaattcacttaaaaatagcctaattaatcaggaatatccgtgttaaaactaccttaaggcatgntcagcattacgtatgttggagggtttaacaggttcttttccactgtcttaaaagttccttcttacttaaagtcccgtgtgggccttcttaactacctttaccctatccaattntaggggtttttctttggttcctccaacctctt

SEQ ID NO: 405 - DNA, 468 bp, Homo sapiens
gtttattaaattaaataagatcttgaaaatatgtatgatgggtcctgggcaggatgttctttttcatcaacgtaatctttctttaggagaggagtactcatttgcttgcaaaggccataatctgttctttgagtggagacactgcatttgtggcctgcaagccccacgtcctgagcaacacaagcggggaggcactggtagaatagagcctttttagtaagtctgtagcagccagaagagcagtgttgtgacgctgtctttctgtttcataacctgtgaggtggctcacggaacctaagtccttcccattgaaggctgccgtactgaggtgatgggccaagctggagatatccccaaagcccatgttgacaccctgtcctgcaagcggatgggactctgtggggctgcatccccaatgagcgccacccgaggcctgacgtacttcagcagcatgtcccaacccaagag

SEQ ID NO: 406 - DNA, 399 bp, Homo sapiens
  misc_feature (1)..(399): n is g, c, a or t
gcagcacccttccagaccaaattgttgataggtgcagatggtcacaactccggagtacggcaggctgttggaatccagaatgtgagctggaactatgaccagtctgctgttgtggctactctgcatttatcagaggccacagacaacaacgtagcctggcagagatttcttccctctgggcctattnctctgctcccgctctcagacaccttgagttccttggtttngtccacgtcccatgaacatgcagcagagtagttagcatggatgaggaaaantttgtggatgccgttaactcttgccttttggagtgatgctgaccanacggacttcatngacacagctggtgcccatgctgcagtatgctgtcagccttctgaagnccactaaaggtctcgg

SEQ ID NO: 407 - DNA, 387 bp, Homo sapiens
tttttttctgggaccagtggtttattttcccgcaaacgctgagtgactcggggccggacagttcataaataattgattcctttccccactaaagcagtcgaggagatttgtaatccactttttagtgcaacaagagctccatgttatgcttgtaataaattatttacacgggagctgggctggtgtgcagtggcaggtcccgtcagaagagatgaggctcctgggacaggtcagcgtcaggggcagcctgctgtctgctctggagggcggcgctcacctctgggtcgcagtccccacgatcagccagcagctctgccacgtgtgagaagctctttttcgggcacgaggtattaactgcagcagaaaaagacgagcttttgttatcag

SEQ ID NO: 408 - DNA, 441 bp, Homo sapiens
  misc_feature (1)..(441): n is g, c, a or t
ttatcacattaactattttttaatatttgattgacatttttgtaatataaccanaataaaaattgcatactttcaagaatgacaaaattcagtagttatgcaaggtgaattaaaatagtaaagctagtcataatatgaagtccactcatccatgttctcatttaatcactttaagaaataataattataaaaataggtaaaattccatganaatattcctatttgttctagttcaggaggtcttgcccacatcaatggattgtctggcatcagcacttgtttcaggcactcgaacagtcatattgtccatagattttgtcaaacagatttggcagcccaaccgtgatctgtctgttagtccatatgccagatcgagcatgtcattctcctcatcagtgattgcatctaacttctcatatatgtgatcttcaaagatgaggg

SEQ ID NO: 409 - DNA, 198 bp, Homo sapiens
  misc_feature (1)..(200): n is g, c, a or t
ggaaccntgggccgggcgggacgccgatggcangcccggtcgctgagcgtgtcggcgcgggcccggagcagcctcagaaagataaaataacagtccacgtttataaaccgtgatggtgaaccatttancaaccaanggaaaanttgntgattcnctgcnanangttgngntngaaanaaanctngntatggntgnttt

SEQ ID NO: 410 - DNA, 348 bp, Homo sapiens
  misc_feature (1)..(400): n is g, c, a or t
aagccagtttataaagtggaagtattaggagattcataaatcttctatattgagaattggctatgttaataaatattacaacatcattaaggttttagctaagtttgattcatgctgtctgttaaatcaaaactgatctaaatcagaattattaaatgtgaggagcttttttaatacaggaaaagaaacatgtcatccacttgagttaatagttttcctacgttgatgacagccctcatgagtagcatccacatttttaaaatttcaaaattggtttttctacctagtagattgtgnttctngagaatgatacaaaggcanaggtgantgtttatggagattcccccc

SEQ ID NO: 411 - DNA, 388 bp, Homo sapiens
tgagtgcaaaaatttattgtgatttttaaaaagttaagtagttcaagaatgcatattctttagaagagcactatacatgcagggacctgggctttatcatcaccctggcaagctaaactgcctcatcaacactgtccctgcaaaagtttctgtagaagttgattcatcaattaaaagccagatccgtatatacacagctgaagaaactgccagcagttcattgctaattaccagggcaaacatttgtatttcaaagttgaccaacaggatgacaattctcaaagctctaaaaagattttgtcctaccaaacacctagcctaatgtattgaccggttaccccatcccgtgggttaagtaacaatcaaagggcaacacttcttaccagcc

SEQ ID NO: 412 - DNA, 517 bp, Homo sapiens
  misc_feature (1)..(520): n is g, c, a or t
ttttttttttttttttttttttttttttttccatttaacatgtatttattgagtcatggctctgtactgttaggcatttgggaatacagagatgagacagacaaaggccctgcccccaaggaacttacagtctagcacaaaaacagaccaaaaaagtgtagtttcaatgacgtgtaacagagagttaagaaggaaatgcaaggggccatgggaagtaagtctttggcaatgacctgttcaagttgcttctgctgatcttcatagtccttcagatctacttcacgagctaaagccctactgcatgaccctcgacaagatcggatcttaatatcaatgtccacctccagtcgtttcatatcaaccaactgagctctaacatttttctgcagaagctggatatgctgtactttttctatgactttgcggcttcggacttcaattctgcttctaagatcctctgnaaaccgggtttaaggaattatcacggtaattggctggggaaaaatcgcccccaaaa

SEQ ID NO: 413 - DNA, 379 bp, Homo sapiens
  misc_feature (1)..(400): n is g, c, a or t
ctgctgagtggccttcgcccaatcccaggctccactcctgggctccattnccactccctgcctgtctcctaggccactaaaccacagctgtcccctggaataaggcaagggggagtntagagcagagcagaagcctgagccagacggagagccacctcctctcccagggacagacatggctcagcggatgacaacacagctgctgctccttctagtgtggggtggctgtagtaggggaggctcagacaaggattgcattnggccagggacttagctttttcaatatcttncatttaacgnccaagcaccacaagggaaaagccaggggnccccagggacaagtttncattgagcagttttcgaccctggggagggaaga

SEQ ID NO: 414 - DNA, 352 bp, Homo sapiens
  misc_feature (1)..(400): n is g, c, a or t
tttttgtgcggtgtctggtttattcaaagtggctgtcagaggcccgaccatggagcaggaaccaaatagttgggagctgtggggctgaacagggcagggatttccaggtatcagaaggtaaaaggaggtcagctgagcagccacagcagcattagggccaggctaagcaggaaaggccaggntgcccagggcccagccccactcatggctgcagcatagaacctcgccacctcctcattggggttgccctggggctgggtcgaaccacatntgggatgcagcggccactncctcggctgtagttncttacctttttnggagttangtccaaanttttcattttcnaaagaac

SEQ ID NO: 415 - DNA, 376 bp, Homo sapiens
  misc_feature (1)..(400): n is g, c, a or t
attcaggaaaaatgcttttgtgtccctgatttggggctaagaaatagacagtcaggctactaaaatattagtgttatttttttgttttttgacttctgcctataccctggggtaagtggagttgggaaatacaagaagagaaagaccagtggggatttgtaagacttagatgagatagcgcataataaggggaagactttaaagtataaagtaaaatgtttgctgtaggttttttatagctattaaaaaaaatcagattatgggaagttttcttctatttttagtttgctaagagttttctgtttctttttcttacatcatgagtgggactttgcatttttntccaantgcattttctaccatgtanttaagatgg

SEQ ID NO: 416 - DNA, 322 bp, Homo sapiens
  misc_feature (1)..(322): n is g, c, a or t
atttttctgaatatttaataaagatataacaccagaaaacagaatcagaggaattacttctcaattccttttcagagaccattacaagtttctctttgttccttattttctatgaaaacttagcaaggatagtagaaaaagtgaaataacagtatataaacataaacacagaaattctaaccaactcctgtgagatataaatatttaaagtacatcaggactaagtgtggtttattccaggggattcaagagtagtttaacattcagaacttaatgaacattatttataatgatttacataaanggaaggngggttaatatg

SEQ ID NO: 417 - DNA, 471 bp, Homo sapiens
  misc_feature (1)..(500): n is g, c, a or t
ctctccggcccccaccgcggatcatgtaccaggattatcccgggaactttgacacctcgtcccggggcagcagcggctctcctgcgcacgccgagtcctactccagcggcggcggcggccagcagaaattccgggtagatatgcctggctcaggcagtgcattcatccccaccatcaacgccatcacgaccagccaggacctgcagtggatggtgcagcccacagtgatcacctccatgtccaacccataccctcgctcgcacccctacagccccctgccgggcctggctctgtccctggacacatggccctcccaagacctggcgtgatcaagaccattggcaccaccgtggggccgcaggaggaagaagattgaagcaagttgtcttcttgaagaaggaggagaagcgtttgcatttcggcgggaaaaggaacaagtttgcttgcagcaaagtttnccggaaccgacgc

SEQ ID NO: 418 - DNA, 489 bp, Homo sapiens
  misc_feature (1)..(520): n is g, c, a or t
gggagttcaaggagtctgatgattggtccccgctgctactgcttctgcggtgatccttggagcaggattcggagggagatgcgggtgactcctgctccaggacgctaggataggtgaagacgaggttcgaggtgcccggagtgacagcaggtgtggaggtcaccacgatgggggtgtgcaggggctcctcaccgtagaagcccccagcaatgctgatgggcttgatgacagagcgctgggccttgtccagccccgccgacgaggacgaggggctgtcctcttccaggggctcctgtttcaccactacagcgcccaccgagccacccccactgcgcatgggctgcagcaaggcggctgggggcgatcggcgctcctcggggctaatctttgcacacttgggccgtganccaaccaacatgaactccaacttctccttctccttcttgcagctcaanaaatctccttcttgcaggcctganttntcctcct

SEQ ID NO: 419 - DNA, 502 bp, Homo sapiens
  misc_feature (1)..(502): n is g, c, a or t
aattttttgctttttcataagtgcaactttttaataaaaatttacatctagataaacaatcttcagatttttgaaactttaataagattttaaaaacatcatgactttgaactgaaaaacatacacgtttagcacacaaatattgtaatatgaatcgaactccaactccatttgaaaacatgtgaatcaaagtacagttttagaagttagtaattcacatttaagcaagttagcgccttgctgaatacagcctttgtaaaaaagagacttagtgcatattttaatggtacactgtggttttgtaccatttggttcgagtttttccgctttattaaacaagttcntggaaagttgggtagataaaggctaacttccnatgacgtggaatttcccaatgggtaacagttacattttggtaacaggacactttccatagattccctttcccagcctnaaatttttaaaagccatcnttggtaagggttgcatccacatccantta

SEQ ID NO: 420 - DNA, 121 bp, Homo sapiens
atataaaatggcaacaaactgcacatgatttcacaaatattaaaaagtcttttaaaaagtattgccaaacattaatgttgatttctagttatttattctgggaatgtatagtatttggaaa

SEQ ID NO: 421 - DNA, 385 bp, Homo sapiens
ttttttttttttccctcctggaatttttccttcttattattttgcttttttaaaggttgttatattcaggtataggcataagacattataaaagataagggatatcatgtgagggaggaaatccgacaatccaaaaaatcttccatagaaattaaaaatcagaacttgggggcaaggtaggaggcaacacattctttctacagagctgtgacacatagcccaactgtcctcaaaagcaggaataaaaaaaataaacaacaacaacaaaaaacagacctcagctgcataatgaagctggggtcttggcctgatagcttttaatgtccttaaaacggggctgggcatcaagcatcttttccggaataggccaaggaagacaagtcca

SEQ ID NO: 422 - DNA, 488 bp, Homo sapiens
cttaactgtcaaactgggtggagatctaggaacctatgtgatcaacaagcagacgccaaacaagcaaatctggctatcttctccatccagtggacctaagcgttatgactggactgggaaaaactgggtgtactcccacgacggcgtgtccctccatgagctgctggccgcagagctcactaaagccttaaaaaccaaactggacttgtcttccttggcctattccggaaaagatgcttgatgcccagccccgttttaaggacattaaaagctatcaggccaagaccccagcttcattatgcagctgaggtctgttttttgttgttgttgtttattttttttattcctgcttttgaggacagttgggctatgtgtcacagctctgtagaaagaatgtgttgcctcctaccttgcccccaagttctgatttttaatttctatggaagattttttggattgtcggatttcctccctcacatgatatccct

SEQ ID NO: 423 - DNA, 305 bp, Homo sapiens
  misc_feature (1)..(305): n is g, c, a or t
actttggacccagcatgtcctgaggttttacccattcgtcaaactgcnctgctgtgagatagccaagttcgatagcagtttcctttaaggttgatccatttttgtgtgctgtcttagcaatctttgctgccttgtcataccctatatgaggattgagagctgtcaccaacattagagactcattcatcagcttgttgatcctttctgtattggcctggattcccaccacggcagtttntcctgtaaaggaaactgaagcantcccccangcangccctggctnaggtgtaacacattttgaatca

SEQ ID NO: 424 - DNA, 468 bp, Homo sapiens
  misc_feature (1)..(500): n is g, c, a or t
gcgnccgctgatagtaaaccaggattatgngtcttgatccaaagattgctaatgcaataatgaaggcagcagatgaggtagctgaaggtaaattaaatgatcattttcctctcgtggtatggcagactggatcaggaactcagacaaatatgaatgtaaatgaagtcattagcaatagagcaattgaaatgttaggaggtgaacttggcagcaagatacctgtgcatcccaacgatcatgttaataaaagccagagctcaaatgatacttttcccacagcaatgcacattgctgctgcaatagaagttcatgaagtactgttaccaggactacagaagttacatgatgctcttgatgcaaaatccaaagagtttgcacagatccatccaagatttggacgtactcatactcaggatgctgttcccacttactcttgggcaggaatttagtggttatgttcaacaagta

SEQ ID NO: 425 - DNA, 471 bp, Homo sapiens
ggaattgaatggacagctttattgccagtcttcaaaaaacaatccattgattggttccatgaagtcgtgactattgctttgtctgggaatgagtccctactgcaattaagtataaaaaatatcttccatcataattggagtgtgacctgcattggagagtggctctgagtaaagagttgataaaaatccacaaagagttgggtttttgtcttttaaaaacattcctttacacactacaaagaaataattagtattttggctttttaaattcctacatgatatttagaatggcggtccccaagggtcctcccttcacgtaattgtgaacacagaccctcttccaagggcacatcccggagttgtcggactctgaagacttcgacctccacgtgtttatactggtttgagaacaaagacagcgtcatccagaacgtagtagtcattatacatgtcgccttcacacaggtatgg

SEQ ID NO: 426 - DNA, 424 bp, Homo sapiens
tttagcctgtttatgtctagaacatctatcaatgggttgctaggaagaggctcaatgtttgtgttttcaccagatcagtttcagagactgcttaaaattaatccagactggaaaacccacagacttcttgatttaggtgctggagatggagaagtcacaaaaatcatgagccctcattttgaagaaatctatgccactgagctttctgaaactatgatatggcagcttcagaaaaagaaatacagagtccttggtataaatgaatggcagaatacggggttccagtatgatgtcatcagctgcctgaacttgctggaccgctgtgatcagcccctgactttgttaaaagatatcagaagtgtcttggagccaactagaggcagggtcatccttgcccttgtcctcccctttcatccctatgtgg

SEQ ID NO: 427 - DNA, 446 bp, Homo sapiens
  misc_feature (1)..(446): n is g, c, a or t
gcagcttcctcttcctccctggagaagagctatgagctgccagatgggaggttatcaccattggcaatgagcgcttccnctgccctgagaccctcttccagccttcctttattggcatggagtccgctggaattcatgagacaacctacaattccatcatgaagtgtgacattgacatccgtaagacttatatgccaacaatgtcctctctgggggcaccaccaactgggatgacatggagaagatctggcaccactccttctacaatgagctgcgtgtagacctgaagagcaccccaccctgctcacagaggctcccctaaatcccaaggccaacagggagaagatgacccagatcatgtttgaaacctttcaatgtcccttgccattgtacggtcgccatttcaagcttgtgctcttccctcttatggccttttgggcgnaaaa

SEQ ID NO: 428 - DNA, 431 bp, Homo sapiens
tactgtaaaatcctgtttaatgtgtaacatttcaggcagagagaggccttggggactagaggcagaggtggccttgaccaacccctgctccaacttatctgcctgcttctctctccctaactccctcaccccagacacctcctccttttccttgtggccagcaagcactattcctcctttactagtgctggccaccctcccttctccacccacatgtccacagcacccctgccctctgctcctcttacccacatccctcctcactgatgtgactccagaaacagggtatctgacagcacagggttaagattagtttcataattggagacgctgtcggagcatcccatctcttgtacccagtggtcccagagagagggagagggaagagggaagggtgcaggcaacaagggcagcccacactcccagtaacc

SEQ ID NO: 429 - DNA, 456 bp, Homo sapiens
  misc_feature (1)..(456): n is g, c, a or t
ggcccatgtgcggctgtggtccctgcagctcatcctagtttccaccccagctctcctcgtggccatgcacgtggctcaccagcaacacatagagaagaaaatgctacggcttgagggccatggggacccctacacctggaggaggtgaagaggcacaaggtccacatctcagggacactgtggtgganctatgtnatataagcttggtgttccagntgttgtttgaggccgtcttcatgtatgtcttttatctgctctaccctggctatgcatggtgcggctggtcaagtgcgacgtctacccctgccccaacacagtggactgcttcgtgtcccgccccaccgagaaaaccgtcttcaccgtcttcatgctaagctggctctggaatctgnatcatcctcaatgtggccgaaggtggtgtacctcatcatccggggctgtgcnccccgaagccca

SEQ ID NO: 430 - DNA, 576 bp, Homo sapiens
  misc_feature (1)..(579): n is g, c, a or t
agatgtgcaggtctttattttcctctccctcactctgctccaacacccagcataaggcactacccccagatgggagggagggagggcgcactgtgaactcagtgtgagggggtcagctgcagcagacggagttgcttccatgtcactctcctctcaagagaagctgctatttcagggtaaatggagtctgctctcatccatggttaaaagtggattgagacgctctacagagaattccatcttctttttaaggaacacatccgaacgacttcagaagggaaattttgatatttaaaaatcagtgtctctcacttcccactccatccgccacctccctttctaagctcagagcacagcgctcctacggtccagccaggcatctctccagaaaggggcttgagagtttcgggcccctgatggagcggctcacttgcttgccgtgaacgcctggattcccgtgatagctctcccaaggatcanggcgtgaatgtcatgtgtaccttcgtaggtgttcacggcctccaggttcatggcgtgccggatcacgtgatactcgtcagaaatccccctcgtgcc

SEQ ID NO: 431 - DNA, 292 bp, Homo sapiens
  misc_feature (1)..(292): n is g, c, a or t
agaagaccaaccacatccaggccctggcacacagcaccggtgggtcagaccttgccgntccctctgaagaagctctttccctccatcatcagcatcacatangccactgcttttttttgaatatgaagggaacttcatccagaanttccagcntgagtanagcaccanatggntctgantacagtgagtacaggtgctcatntgctttttggtaagttcctacaaaaccacatgttggaccttcggnttagcaactccaagctcttctggcgggcnctggccatgctgcagc

SEQ ID NO: 432 - DNA, 402 bp, Homo sapiens
  misc_feature (1)..(402): n is g, c, a or t
tccaaaataagacatttcattttatttctgaaatcagaataagtcggtgagagtagaaaccactaggtcgagagcaagaactctcccccaaagtggagagaatatttctccctaccctgggctgcggatncctggaaatggggcttcttcctcccacatgttctgctggcacaagtccccttgggcgggctgggctgaagtgggcagggttgggcccctttcacccacccagaaacatgggttcactgaacgtcaggctctagggatctcgagggggtccgcagtggctttctggacctgggcccagcaagagcactcctggacagcctcacagacagaagggagcttgcagccagggtnttgccctgagcctcagtnatcgagcaccggantagggagggn

SEQ ID NO: 433 - DNA, 430 bp, Homo sapiens
aaaaactgtattgaagaattagtcattggagtcttggcttgctaattaaccagtgcttgttcgttccatggatgttgaagttcttgtttcttggtgcaaagacattctggaaagccttctggtactgaggtgcagctgtccaaggcgaatgaggcgcttggagtggcgatcatcatgaagaagggctcaaagttggacttgtagtccagaaagtccaaggagacattagccaaaacatctgtcaggtagtccacactatagttttcaccatgcttccgtgccttcccattgatagacagggtgtaattataatacttagaattcttttccaaggcataccagtaactccaacccagaggaacgtgttctagtccacctgcatctggggctccgtactcatttaaatatttccctgcaaaaaaggtctgat

SEQ ID NO: 434 - DNA, 350 bp, Homo sapiens
  misc_feature (1)..(400): n is g, c, a or t
tttcggcacggangtatacctgccacctcagcctcccaagtagctgagaccacaggcacacatcactacacctggctaattttttgtatttttggtagagacgaagttcaccatgttgtccaggctggtcttgaactcctgagctcaggcgatnctaccctccttggcctcccaaagtgctgagattacaggtgtgagccaccccgcccggctgtagtttttcatattatttgtataatagggttagggttccagcctggggtggacagaggcaaggctcttattcttcaaacaaacaaacaaacaaacaaacaaaaaacctttgggaggaaaattgggggantttgcnt

SEQ ID NO: 435 - DNA, 346 bp, Homo sapiens
  misc_feature (1)..(246): n is g, c, a or t
  misc_feature (1)..(346): n is g, c, a or t
accccactaaccatctattaattatacttaagctggncccccattactgagagtgcattactatataattaaagccatttagacatggcttggcatagcacttgcatgatacgccacatactaaaaactcctccttaggcagccttcttttcctatcagattcagagctcctttctccttttctcgggnaaaaatgaacacaggnaggaaaattctcagttagggntctccagcctgggggcttgtgagctgggccctncggggggaggtcttgcttttgtatatggtgacgggaggaataaggtaaggtcttcaggggggggaaatcccngggaccaaccccaac

SEQ ID NO: 436 - DNA, 292 bp, Homo sapiens
  misc_feature (1)..(300): n is g, c, a or t
aggggtcatctagaaaggtgggccccctgacaaaccgcgggactgtgatcgggctccagctacttcaccaccccgggccagcctgctccaggggtcccttcctgctgagagcaggcgagaggcagtcaggctcatgaagcagccaccgggtttggctcactggaaggaatcacactggaaacatgtttagcccgcagtgcagagtggctccagaagggagaggttctggaagacgncccaacctgccgggctgctcccagagttgcacagtgaggggcaaggcacccagggc

SEQ ID NO: 437 - DNA, 392 bp, Homo sapiens
  misc_feature (1)..(400): n is g, c, a, or t
ggcagcggccttgcgtcctctccgggggcggacggngtcggcgggcctgacagggaacctccctgaccgagcccacgtctccccacggccagagaaatctccggcccggcccgcatcgccagcccccaggcccggagaacggcccgagcccaggagaaccacatcttcgtcccagcccctgacccccacccaaacctgtccttccgctttgcccccaaacagtgcacttgccggcggtcccaacccagcaggagaagtggacatgaggttggcaggccctctccgcattgtggtnctagtcgtcagtgtgggtgtcacatggatncgtggtcagcatcctcctggggtgggcctgggcagtggcttttncttcgcatnccagcaatttttca

SEQ ID NO: 438 - DNA, 474 bp, Homo sapiens
agcagattttgtcatgctgggaggaatgttttcgggtcatacggatgtgctggagaagtgtttgagaggaacggacggaagctcaagctcttctacgggatgagctctgacaccgccatgaacaagcacgcaggaggagttgctgagtacagagcctctgagggtaagactgtggaagttccttacaaaggagatgtggaaaacactatcctggatattctcgggggactgaggtcacgtgcacctacgtgggggccgccaaactcaaggagctcagcaggagggcaacattcatcgcgggtgacccagcagcacaacaccgtgttcagctaaccctggggacaaagcagcgtctggctcgagtggaagcgtccaaacctgcttttcccatctccccccaagtctgttccgtcagagcttctggctgctcctgaatggtggaatgctgtgtcctctcttctgtctcctgccgcc

SEQ ID NO: 439 - DNA, 464 bp, Homo sapiens
aagataatagcattatattaaagtgaaaccatcttcttttaaaaaagaaagaaaaacaaagaaagggagagagaaagagaaaaagagaaaggtgcaagtgttggtttgaacaatgaggttatgagttctgggcagcagggctctgatgttggcccaatcggtgccttgcgtctgggccccgagaaggcaggcgggagagccccgaagcctccaggcggcaggagacagaagagaggacacagcattccaccattcaggagcagccagaagctctgacggaacagacttggggggagatgggaaaagcaggtttggacgcttccactcgagccagacgctgctttgtccccagggttagctgaacacggtgttgtgctgctgggtcacccggatgaatgttgccctcctgctgagctccttgagtttggcggccccacgtaggtgcacgtggacctcagtccccc

SEQ ID NO: 440 - DNA, 468 bp, Homo sapiens
  misc_feature (1)..(500): n is g, c, a or t
tctataggcattcactgtttgagtcaaggttaggcttgttaagtgattaaaggcaattttattacagcagcatgtacttattctattctanangaataatattcataaacagaaacaggttttatatttgtttgcaacctgcaaaattgaattattttgctgatataaantactaagaactcacttgaggaccatgccaccttctgaaaaggccacacacctacttcttanatgtgttaaagttacagtgtgtcccagactcatccagaaannataagcaagcaacntgacgtgctcgttgncttgttcctccccagcacctatcactgattgtgttgggaaaagccacagagcaaggcttgcacaagccaagataaaggaggctttttatttaaaggcgaaataccanaatggctctctgggtgtaggtgattttctantttcacactcagctttgtacatgatccg

SEQ ID NO: 441 - DNA, 403 bp, Homo sapiens
gtttaatcaagacaggatctcactatgttgcccaggcttgtctcaaattcctggactcaagccatcctcctgcctcggcctcccaaagtgctgggattacaggcataagccactgccccggcctagttggaattgttgtttgaggtcctggcattgatgtgcctgctccagacatgagcacaggtgagcgggagatgtcctggatcgctgatacctatgccagcaccatagggcactatgatattaatgcacacgcctgtgttactggtaaacccatcagccaagggggaatccatggacgcatctctgctactggccgtggtgtcttccatgggattgaaaatttcatcaatgaagcttcttacatgagcattttaggaatgacaccagggtttgggagata

SEQ ID NO: 442 - DNA, 463 bp, Homo sapiens
  misc_feature (1)..(500): n is g, c, a or t
ttttttttcttgatcaacatttttattttatttttttaggtgaagtagaacacaatagaatggctcaaaaatatcagaatgcactacgcacatcacgagtaaatactgtttggtaaaacttgtttcagttaaatatgtacgtgtccgtgcatgtcatgattaaatatccttcttaccacagtcaccctaaagnaaccaaagcttagggactagggacacaaccatgcagnaaagagcagggagaccagacactctggggttgaggatgatgaatttaatgccgcagccggacacccacatttcacactttgggcttcctttcagacaacttgatctttgggggantagaatttgttacaggggttcaaacaccacataggaaggcacgtggggccngccacacacagcattcntttttaggtgaggagggggncaggttacccttgtctncatggttncaagg

SEQ ID NO: 443 - DNA, 486 bp, Homo sapiens
  misc_feature (1)..(500): n is g, c, a or t
tcttgattcctagtctctcgatatggcacctccgtcagtctttgccgaggttccgcagcccagcctgtcctggtcttcaagctcactgccgacttcagggaggatccggacccccgcaagtcaacctgggagtgggagcatatcgcacggatgactgccatccctgggttttgccagtagtgaagaaagtggagcagaagattgctaatgacaatagcctaaatcacgagtatctgccaatcctgggcctggctgagttccggagctgtgcttctcgtcttgcccttggggatgacagcccagcactcaaggagaagcgggtaggaggtgtgcaatctttggggggaacaggtgcacttcgaattggagctgatttcttagcgcgttggtacaatgggaacaaacaacaagaacacacctgtntatgtgttcntcaccaacnggggagattcacatggtgtgtttttccgttgttggtttttaatt

SEQ ID NO: 444 - DNA, 535 bp, Homo sapiens
tcaattatgccattgcgatatttcagaagctttgactgaagtgtcaggttcctcgtgagaaacagcacacgttagaggctttgagagaaggcctagttctgtcatgagtagtcggcgtcgtgtctgtgctcgcatcttggaacaaccttatcaacaggccgcactgcagagatgatgttttatgaaaaccaatgaggctgctgccactccagcaagggagataatgcagtttcctgtcttatttaagaaaaagagaaggctctcgtttctcccttgtcggtgccgttcttttccttacgcgcaaagagttgtgaactattgcagattttcatcccattctagtgcgtgattgggcatcggctcgatcctatcgaggattatttaagaatggagagcatggttgtctgctgatgccggagcctcaggcttttcagcaaagaatagtggagagtaggaaactgtagcttatgtcggggatgtctggaatgggagtgcaagtttcgtcaggtgggatggtggccctgccggattggac

SEQ ID NO: 445 - DNA, 547 bp, Homo sapiens
gggtctacagtaattttattgtaacagagaaaccaggccgcaataagtctacatggttagagcagatggtggttctttccagtgggtgaagcctgaacccagctagcagcacgcaaagcctagaatatcctctttcctggtaccaccctgcgccgctggactcacagtgtgagatgagaggctgcacaccacattcaacaaagggaggaggtccaaccgggcagagacaacatcccaactggagaaacttgcactatcattcaagaggatgccgagataaagtacagtttcctactctccactattctttgctgaaaagggtgagggtacggcatcagcagaaaattatgttcttcatgtcttaaatgaatctcggtaggatggagttgatggtcaatcaagcagtagaatgggatgaaaatctcaatagttaaaaaatctttgcgtgtaaggaaaagaacggcaatgacacgggagaaaagagaggcctctctgtttcttaaattaggccgggaactgcattatgttccctgcctggagtggagca

SEQ ID NO: 446 - DNA, 505 bp, Homo sapiens
ttttttgctgacacccggcactttattagtggggaaactcgccttggtctggcagagactgggatcaacaggaccagcacccatctcgaggtggtattttctgtaagatcaggtgttcctccctcgtaggtttagaggaaacaccctcatagatgaaaacccccccgagacagcagcactgcaactgccaagcagccggggtaggaggggcgccctaggcacagctgggcccttgagacagcagggcttcgatgtcaggctcgatgtcaatggtctggaagcggcggctgtacctgcgtaggggcacaccgtcaggcccaccaggaacttctcaaagttccaggcaacatcgttgcgacacaccggagaccaggtaatgagcttggggtcggtcataagcgcggtggcgtcgtcgctgggagctggcagggctcccgcaggaaggcgaagagaggtttcgccccgaccgtttagctgaacttttcaagagctgaagtttggctcg

SEQ ID NO: 447 - DNA, 503 bp, Homo sapiens
cccaacttcatgctcttcgagaagtgcgaggtgaacggtgcgggggcgcaccctctcttcgccttcctgcgggaggccctgccagctcccagcgacgacgccaccgcgcttatgaccgaccccaagctcatcacctggtctccggtgtgtcgcaacgatgttgcgtggaactttgagaagttcctggtgggccctgacggtgtgcccctacgcaggtacagccgccgcttccagaccattgacatcgagcctgacatcgaagccctgctgtctcaagggcccagctgtgcctagggcgcccctcctaccccggctgcttggcagttgcagtgctgctgtctcgggggggttttcatctatgagggtgtttcctctaaacctacgagggaggaacacctgatcttacagaaaataccacctcgagatgggtgctggtcctgttgatcccagtctctgccagaccaaggcgagtttccccactaataaagtgccgggtgtcagca

SEQ ID NO: 448 - DNA, 408 bp, Homo sapiens
  misc_feature (1)..(410): n is g, c, a or t
tnantcaagcctggatggggagaaggtagatttcaatacgttccggggcagggcgtgctgattgagaatgtggcttcgctctgaggcacaaccacccgggacttcacccagctcaacganctgcaaatgccgctttcccaggcgcctggtggtccttggcttcccttgcaaccaatttggacatcagagcaggagagacagaagtagcaaacccctctttcgagatgtccctccaagcccaagaagtacctccagcctcacaccatctcttcagcctagcaagttgctggagggaagtctataacctaccaggagccagccaagccatttgtatcaagaattngaaatctgccagggtacagtggttcaacctataatcccagcggctttggaaggctaaggnggact

SEQ ID NO: 449 - DNA, 424 bp, Homo sapiens
tttccacacctgccctttattggtctctcctagcagagtggctccaggcccttcacgcctctcagacaccacccatgagggtttaggaaggtgccatcattctgtgaaggcccagagcttacccaagtcttggagcccaagttgaatcaccaaccagagggttgggagaggaaaaggaaacaggcagaggggaaaggcaaggctctgcagtgaaggggactgatatcaagggaatgctgaggtccagcagtgtctcctgaaggcatgctgcatcctaaggctcctcaggactggatggagtaggagatctgtgtgttgagcagttcacatctatatggcaactttaaggaggcgcttgatgtcaggctcaatgttgatggttgggaaggtgcggctgtagcgtcggaagggctctccctccggt

SEQ ID NO: 450 - DNA, 213 bp, Homo sapiens
ttttttttttttttttttttttttttttttgctgcagaaaggcttttactgggcatacggggtgagtctcaagccagtggaccagtgaggggtgagggcacgtcctccgaagagcatggggtggcatccctgcccaggggccttagcctgaatgcactaagggctggccctcagacaggctcaggggaggtccgcccaaagggtttgggccct

SEQ ID NO: 451 - DNA, 422 bp, Homo sapiens
ttttttttttttttttttttttttttttttttttttttttttttttcagctgctgcaaaaaggcttttactgggcaaacggggggagtctaaacccaggggaccagggaggggggagggcccctcccccaaaggagcagggggggcatccctgcccaggggccttaacctgaatgcactaagggctggcccctcaaacaggctcaggggaggcccccccacaagggttttgggcccctccctaataaaaaccccacccctgccatgggggccggggcccttgctatcacatttgccttggttgatctcagggaggttgatctctttcagggaaaactgggggggggggatttacccttggaagggcccttcaaaaaaaagaatggggggttggggagtgtggtaaacccaaaaacttctggg

SEQ ID NO: 452 - DNA, 518 bp, Homo sapiens
tttacaggtaatgtggacacagctgtccactctgaattcatgcatgatcatgctgattatggctttccaagttgtgagggtaaattcaattggcgtgttattaaggaaaagcgggatgcctatgtgagccgcctgaatgccatctatcaaaacaatctcaccaagtcccatatagaaatcatccgtggccatgcagccttcacgagtgatcccaagcccacaatagaggtcagtgggaaaaagtacaccgccccacacatcctgatcgccacaggtggtatgccctccacccctcatgagagccagatccccggtgccagcttaggaataaccagcgatggattttttcagctggaagaattgcccggccgcagcgtcattgttggtgcaggttacattgctgtggagatggcagggatcctgtcagccctgggttctaagacatcactgatgatacggcatgataaggtacttagaagttttgattcaatgatcagcaccaactgcacggaggagct

SEQ ID NO: 453 - DNA, 568 bp, Homo sapiens
tttttttttgaatcagcaatgcagttttatttaaggcagaattagggaaaggctatgcgcctccactccccctcctcctaccactcagtcctatcccaagtcaggcactggaacctgctgaaaaggctgatgaggggctgacaggagtggggcagggttcatggacctttacctcagagcagcttaccctgagctatacccacatctcaaggatttgggggcgtctagatctcatctaagggagacacaacttttctggtcctcagatggaaagctgggggaaggtaccagtatttacccttccataaaaactttggaggtctttaggaggatacccctcaggagggctaggagaggaatgacaaatacagaggatagaaggtcccgtggcctggttgtgccctcacacagggtatgggttgtccaggactgccactcccgctgccacaccaccatctgcatgctcgatggctttggttcgaagtagatgctcacgtgcttgttcatcacgagtgtcttttctggctgacatagactcaaagatgcccagctctgaaatgcactggac

SEQ ID NO: 454 - DNA, 398 bp, Homo sapiens
ttcaggcagagacgcggcaccatggctagcaagaaagtctgcattgtaggctccgggaactggggctcagccatcgccaagatcgtgggtggaaatgcagcccagctggcacagtttgacccacgggtgaccatgtgggtatttgaggaagacattggaggcaaaaagctgacttgagatcatcaacacgcagcatgagaatgtcaaatacctgccagggcacaagttgcccccaaatgtggtggctgtcccagatgtggtccaggctgcagaggatgcttgacatcctgatctttgtggtgccccatcagttcatcggcaagatcttgtgaccagctcaagggccatctgaaaggcaaacgccacttggcatatctcttaattaaggggggtagaca

SEQ ID NO: 455 - DNA, 519 bp, Homo sapiens
  misc_feature (1)..(519): n is g, c, a or t
ttgtttgagatctttgtattttgttaacaaacactgagatccatcgaagctgtgtgggtcctggcagaggtcagcaaaggggtccttggggcctgcatcagctcagaagcccagacccctccctgacaatccttgcctcatcgctcctgtggctaagatacttcttcagccctttaacaggattactggtgtatgtgagacagccactagcagcccctgccctaccggcctctcccccaacccttctccacatacatcacccccgccaccaagcaggcagcactggggcttgattccacccctcccagaggatatggangaaagccccacatctggagagggacagggcaactgcatttctggcaaatgtggtggcatgaggctgccagtggtttgacagttcaggatctccaggtgcgtntggggccccatagcctcctgtcctccagtgaaaagatgagaagactctgctcctgggagtcctggagatctggtgactaggtacccaggcttctgctg

SEQ ID NO: 456 - DNA, 452 bp, Homo sapiens
  misc_feature (1)..(462): n is g, c, a or t
gccaaaatattatgtttttagaactcatttagaataagggaataaacaaaaagagaatgtgtcacatctaacaggtcacaaaacagatgcaaaactaatgtgcattgaaaatgagaaaaagaaaaaaatatacttaaaagctagactgaatggcaaatacaaataaagtacagcaaataaagctggcaaatacaccaacaccttaaagttttggaatgttttctagtgttaaaaaaaggcagctatccacattcattatttcagagtggtttcagtcatctctggttgttacatggtgatttgtcgtttctatgtttgttggctgtggatttactgcccagactcacaatcctccacaactacggtccactggaattnggaactcttctgtcgaggttctcttctgcagttttcattagtatagcaagccgggcttccagataccctttcct

SEQ ID NO: 457 - DNA, 513 bp, Homo sapiens
attcggcacaggatttcacgtcgtactcgcctggcctttctaaatgtccaggcagcagaggaagccctacccaggattgttgaactgatgggcagggaactgaattgggatgattataagaagcaggaacaacttgaaacagccaggaattttctatattatgaaatgggctataaatctcgatcagaacagttaacagatcgctctgaaattagcctactgccttcagacattgacaggtataagaagagatttcataagtttgatgcagaccagaaaggctttattaccattgttgatgttcagcgtgtattagagagtatcaatgtccaaatggatgaaaatacactccatgaaattctaaatgaagttgatttgaataaaaatggacaggttgaactcaatgaatttttgcagctgatgagtgctattcaaaaaggaagggtatctggaagccggcttgctatactaatgaaaactgcagaagagaacctcgacagaagagttccaatt

SEQ ID NO: 458 - DNA, 306 bp, Homo sapiens
  misc_feature (1)..(400): n is g, c, a or t
ttttttttttttcaatctggaacacaaaagtttattagaataaaaatacacatacggtatcaacactaaaattatttcacatcgcatttaggttttacctccattagtttttnttaatgcttataaagnctatgctctaaataatttgcacatttgtaaacaaatcttagatgaccaaagatgcagtgtatctatcagcatattgaatatcaaancttaaggatgggaactgatagcgaaatccaattacactaaacattcctaaatttttgggaaagagaggaaaaagnattaanataattcact

SEQ ID NO: 459 - DNA, 493 bp, Homo sapiens
  misc_feature (1)..(500): n is g, c, a or t
gattatcgaggctcccatggcatggcgttcacgttctttgagtaccgagcgtacaggtcaattatcaaagactacttccaccgtggcgccaagtggacaacagctcctaagcccacaatggctgatgagctttataaccaggattatcccatccactctgtagaagacagacacaaattggctgctcagggaaaatttgtgacaactgagtttgagccatgctttgatgctgctgacttcattcgagctggaagagatatttttgcacagagaagccaggttacaaactacctaggcattgaatggatgcgtaggcatctttgctccagactacagagtgcatatcatctcctttaaagatcccaatcccatggcatattgatgctaccttcaacatcattgggaccgggnattgtggntttcccaacccttgaaccgaccctgttcaccagattgatcnttttcaaggaaggcgggttgggattttccntta

SEQ ID NO: 460 - DNA, 399 bp, Homo sapiens
  misc_feature (1)..(400): n is g, c, a or t
aaatnttacagatcttggcttaagaaaaaccagatttgtgactaaagaaaacattttcttggagctttgcattgttctggcttaaatttccttttaaaaagtaactttccgtaagttaaagttagcactttcacaaatactagcagagttactaaatgaaatattaacatcaaaacaaacatgattagcgaaggaagtattttattattttgctgcaaagctgttgcttcactgtataaaaatagcacccagcaaatgcagtgtatcggcaaaattaggatagtggggtgttccctcatctgacactggtaccaggccaccaaaccctcttcacttccaggtttatttcccatgggggaaggtccattagggattttccatccccaanccggggggttg

SEQ ID NO: 461 - DNA, 306 bp, Homo sapiens
  misc_feature (1)..(400): n is g, c, a or t
aaatcttgttatgaagatggttggctgatcaagatgacactgagtaacccttcagaactagatgaacttatgagtgaagaagcatatgagaaatacataaaatctattgaggagtgaaaatggaactcctaaataaactagtatgaaataacgcaagccagcagagttgtcttaaattagtggtgggataggaagacttaggaataggaaacttttagtattacccgatggggggaaaaaaaaactactgtttaacactggcttattgaaaggaaantgccccttttaacttttgttaatgattat

SEQ ID NO: 462 - DNA, 341 bp, Homo sapiens
  misc_feature (1)..(341): n is g, c, a or t
ncgatattaaangccaactacatggccaagcgattagaancacactacagaattcttttcaggggtgcaagaggttatgtgggtcatgaatttattttggacacgagacccttcaaaaagtctgcaaatattgaggctgtggatgtggccaagagactccaggattatggatttcacgcccctaccatgtcctggcctgtgnagggaccctcatggtggagcccactgagtcggaggacaaggcagagctggacagattctgtgatgccatgatcagcattcggcaggaaaattgctgacattgaggaagggccgcatcgacccccagggtcaatnccgct

SEQ ID NO: 463 - DNA, 607 bp, Homo sapiens
  misc_feature (1)..(607): n is g, c, a or t
ttccgatcaaaatgcttttattagaatactaataaatgcagattaaaaaaaaaaaacctcacacagaaaaagaggaaaacactcagaaatgtgattacagattaggcatattagaggaaaaagagttcttcagggtatacaaaatgtaaacatttgccctgggatttcccacagatggcacagtccacatggactcttttggaacaaaaaaatgtctattaagtctccaggatagcctctatgacatctgcaaacttgccacattaaaagttaaagttcctaaaactttctacgcaaaacacaaaatggctcccaatccaggcaactggcacatgtggaagcagaataccaaagcaaatccgtcttccaaccatcagcttcgactccctccagctactgtatttacatttaccttgacaggagattaccngggatatacncagtatataaaactcctacttgaggctgggggtgggagatgaaatctttcctggctatccaatgcccgggggagagggcatcaatcagtccttaacntaggggggagaggnctaagaagacgccncttttgttcggaaatggggactcntaaacttccatgggnggg

SEQ ID NO: 464 - DNA, 370 bp, Homo sapiens
  misc_feature (1)..(370): n is g, c, a or t
cggtatctacattcttgaccggcggttccnagcctgggatgattcctgctcgcagctcacctccttcctctacagtttctgtcagcagagccggcgnaggtaatcatccagcggaaccgacggagcgcctctccgaccttctggactngaaatacctaggccggtactatatgtctgcgcgccacatggntgttccaaggcctttccagagcacttcacctacgagcccaacgaggcgggatgcgggcccaggggtaccgctacccacggccagcctcggtgccaccgtcgccctcgctgtcacgacactccagcccgcaccagagtnaggacgaggaggatncccggaacggntcggttngagggaagg

SEQ ID NO: 465 - DNA, 478 bp, Homo sapiens
  misc_feature (1)..(478): n is g, c, a or t
tttttttttnttttcttaaatatagtatgtatttttttcatctcatctccggacacactccaatcacacccctcctgccctcccctctcaactgcaaaccaagcggtgcagacacagcacagcacacatgaggggccctccctttcaccaaagctgaaggcagggcacagtttggggatggaagagcctcgaggtaaatntgggggttctagaacccagtgacctcagttctggatcatgggaaagggatcagtatgcagtaacgtggtaaggttccagatctagaagccagggacctaggaacctagtggtttcacagtgggcagagcagttggggattaagccaggttagggntgggggtaagacagccagcttctgtcctcttncagggcggattccctgggagggagattntcagattttaggaaaggaagattaggatntggttccagaaagggccagaaagacaggaagttt

SEQ ID NO: 466 - DNA, 410 bp, Homo sapiens
  misc_feature (1)..(410): n is g, c, a or t
gaggttgtcatcttggagtatttccatcatactatgaaccctggggttatactccagctgaatgcactgtgatgggtatccccagtgtgaccacgaatctctccgggtttggctgtttcatgcaggagcacgtggctgatcctactgcttacggtatttacatcgttgacaggcggttccgttctccagatgattcttgcaatcagctgactaagtttctctatggattttgcaaacagtcacgccgccaaaggattatccangaggaacangaactgagaggctctcagatcttctggattggaagatacttaggcagatattaccagcaatgccagacaccttgacattaaagcagagcttttccaagataaatttccatgtggaactaacatcaccaccaacgacag

SEQ ID NO: 467 - DNA, 416 bp, Homo sapiens
  misc_feature (1)..(416): n is g, c, a or t
aagttattaaatattaatgtgtttatttacttggattttacaagttatcatctatgaagattgaccaaattttaaaaaggctttctatttaaacaatagaaaaatgttacagtaagatggtggtaccatgtacatggtaatatcttgcattaattacaacatcaattctagatttcaaaagtgacataaatgtccattaatatgcatcaaaatatggacttaggatagctattcactcatggatttttgtctctgcaaaactacatctaaatcatggttctgatgcatgtgaaaaatgaaaataatcagtaaaaacctaagctatttaaaaaatgtaggtaagtngcaccattcatgggtaagatccaaggttttcgggggggaaatgggaaatttgtgtggtgggggtagagaag

SEQ ID NO: 468 - DNA, 680 bp, Homo sapiens
catcaagtgagtttaaaaacacccaccccatcaacagcagctaagcttccttcaccacccccaccagggcgggtctcagagtgcgcccatgcagcttgtaccccactttgctaactagggccactgtgcctggctccttcccctcaaccggtgtgtggaacaaggcctcatgttcataagggtcgaacttggctccacaggttcaacttgagcaagccatgctttgtgaacaccttctggatctggacttcagtcatgaccagcccctcatagaggttcttcaggtgagggttatcgtctttaatttcttcttttggaacacactgtgttgccttctccagaacgtctgccacctccaacaagtccttgcagaaggcttgaatgccgtataattttgcctcctccaccaatttctggctcctctgccgtaagttctcagtgtctgccaaagctcgtttatattttttcacagtctccttcagctgttcctccaacttgaccttctcttccaggagggtcttctctgtagcaggaggatctgccctctgttcactctgacccatgtcccctttcaggttcttggcactggtcctttggtttcgtggccgtgcacaacaaaccggggaagatgggcctagagacaacgccaaagcaagaaaaactggccgggcaaacttaag

SEQ ID NO: 469 - DNA, 345 bp, Homo sapiens
ttttttttttttctattgcaatataaccaaccctgtttattttaataataataaacactgtcagtcttttaaaaaccatgataacaattaaaaactttgaacagcatgacaaagctaatggcaacctcttgaaccccgttttaaagctagttctacttccaaataaaactttaaagcggtttagccagcatcagcttaggaatattttcttcaatgttctaaggtataatgtttggcatcaaaaagtatggtaagcagttctgatttgtgactaaagaaaaaataatcaagtcctaaaataccagtggctcttgtgacagggtaaatatccccattcaagtaatg

SEQ ID NO: 470 - DNA, 537 bp, Homo sapiens
tttgatcggcccgttcaccgcaggaagcttgcccagctcgagaaactacaagatgaagagctggaccccgaatttgtgcaacaagtagcagacttctgttcctacatctttagtaattccaaaactaaaactctttcaggaggcatccaggtcaacgggcctcgtctagagagcctggtgctgacctacgtcaatgccatcagcagtggggatctgccgtgcatggagaacgcagtcctggcctttgccaagatagagaactcagctgcagtgcaaaaggtatttgccacttatgagcagcagatggggccaaaagttgaagctgcccaaagaaagcctccaggagctgctggacctgacacagggaagttaaaaaagggccattggaagctttcatccgggagttccctaaaagaatgtgggccattctttttcaaaaggggtgtaagggcccagctgggaaaaaaagggggatgccttttgtaaacggaacccgggagcctcttcgaatcggttgccagggttacttcgggcatt

SEQ ID NO: 471 - DNA, 447 bp, Homo sapiens
tctaaaattgtttcaattatgccttggttaggggtgacaggaaggctctggtctttagcttatggtacatgcctttcgtcgtctcattttcgtctggagatcctgtatctcatttttcattattctgctttctttttgaaatccctcttttagtagttgctcctgttcctgaagtttaagagcgagggtcctctcttgctctttcagcaactggaccctgtcgttctccatcttctcagtcagttgtttcaagtgttcctgataactcctctccttctgttccatcatctgctcattctttctttgcatttcctgcaacatttttgctgaagcctgtgcagactcagctttcacacggtccacttcaatctccttttccttttctgtgagagtctgggcggtctggagattgcaacagtcatagactcttggagttcaagtatgtct

SEQ ID NO: 472 - DNA, 375 bp, Homo sapiens
tttgtattttataaattttaatccataaaaatataaataagaatggtaaatttttaagaaaaaaaatatacatttagtgcaagttatgaattacatttcttcttcagtgtcagccatgagatatcttgagaaaagaaaagaatgactgatctaatttcaattttaaaaattccagtgttttaacatgcaattaataccagatacagctaatcagaatacttccttctctttactgtcaaagcagcagcattttatttaattatgctcaacagcacttgtatatcatagtagtagttttagaaatagaaaatttgcataagacccggtcacattatccataaagtctgagaggaaaaccaaaaagaaaactttatc

SEQ ID NO: 473 - DNA, 394 bp, Homo sapiens
ctcgaaggaatgatcctcccttagctgtcctgacacaggacaatatgacagtggatgatatagaaaacatgattaatgaaaccagctacaatggatttcctgtcataatgtcaaaagaatctcagagattagtgggatttgcctcagaagagacctgacaattgcaatagaaagtgccaggaaaaaacaagaaggtatcgttggcagttctcgggtgtgttttgcacagcacaccccatctcttccagcagaaagtcctcggccattgaagcttcgaagcattcttgacatgagcccttttacagtgacagaccacaccccaatggagatcgtggtggatattttccggaagctgggactgaggcagtgcattgtaactcacaatgggcgcctc

SEQ ID NO: 474 - DNA, 199 bp, Homo sapiens
agatggagcacgtggtccaggcatgccaccgcttcatccaggccagctatgaacctctgggcatctccctgcgccacctgcagaccctcaagagccacgttcgcatccacaccggagagaagccttaccactgcgacccctgtggcctgcatttccggcacaagagtcaactgcggctgcatctgcgccagaaacacgg

SEQ ID NO: 475 - DNA, 486 bp, Homo sapiens
  misc_feature (1)..(500): n is g, c, a or t
atttcggcactaggggaggcctacacgccgccgcttgtgctgcagccatgtctctagtgatccctgaaaagttccagcatattttgcgagtactcaacaccaacatcgatgggcggcggaaaatagcctttgccatcactgccattaagggtgtgggccgaagatatgctcatgtggtgttgaggaaagcagacattgacctcaccaagagggcgggagaactcactgaggatgaggtggaacgtgtgatcaccattatgcagaatccacgccagtacaagatcccagactggttcttgaacagacagaaggatgtaaaggatggaaaatacagccaggtcctagccaatggtctggacaacaagctccgtgaaagacctggaagcgacttgaagaagattccggggnccatagaaggcttgcgtcacttctnggggccttcgtntccgaaggncagcacaccaagaaccactgggccgccgttgc

SEQ ID NO: 476 - DNA, 463 bp, Homo sapiens
  misc_feature (1)..(463): n is g, c, a or t
gcgaccgccgagcgacagatccagaacggcctggcctgcagcggtgcctgacgcgaacggcancccgggctctcccgctcattcccatcgtggtggagcagacgggtcgcggcgagncgcctgatgacatctactcgcggctgctgcgggangcactcagtgtgcgtcatgggcccgatcgatgacagcgttgccagccttgttatcgcacagctcctcttcctgcaatccngagagcaacaagaagcccatccacatgtacatcaacagccctggtggtgtggtgaccgcgggcctggcatctacgacacgatgcagtacatcctcaacccgatctgcacctggtgcgttgggccaggccgccagcatgggctcccttgcttctcgccgccggaaccccaggcatgcgccactcgctccccaactcccgtatcatgatccaccagccctcaggaggcgcccg

SEQ ID NO: 477 - DNA, 472 bp, Homo sapiens
tttaaagaccacaaagatttaatttaaaatcacagtgtctcagctggaatgccccgtccatagcgggcacccctgcaaattaaaagttcctcaagaggcccctccaagcccagcaacaaggggtgagcagggcccagctgggggtctggcaggcctctgcccatccacatgattctggagaggaggcccagctctcaggtgctagctgggacaggttctgctgccggcgctgcttctacaggctccttctgcaccagcgtgggctcatcctcaccgtcctggggagggtggaccaagaaccttgtctaagatgccaaactcctgggcctccatggggctcatgtaagcggtccctctccatggcggactcgatcacctgcaggctctgtttggtgtgcttggcgtaaatgttatagaagctgcttcttgaacttcatgatctcctctgcctggatggcaatgtctgtggctg

SEQ ID NO: 478 - DNA, 480 bp, Homo sapiens
ttttttttttttttttgctctttatttctgtgctgtctaaatgtcaggatcactaggaaagatgattctagcctcttcatcctcccatttccagatggaggcctccctagggtagggagctatgatgggaaataggagcctctcattgggtggaaatggtagtcactgtgaaaactgcttctctaaacacaggtctagcctgactctcagtaatcccccaccctacaaagtgaaaggcatggccccagggacttcttctttgtttgacttcttctgctctcatttgcttggcctggactcattttgtgggctatggggctgctgctgggtttgacagcccttgtcctgagtttgcggtgagttgggctcagactccatgttaaggggtgagacttcaggcttggtctccaaaccacagcacctggcctgaatgcagcatgggggttttggctggcagcagtgattagtgtttggtgggca

SEQ ID NO: 479 - DNA, 454 bp, Homo sapiens
  misc_feature (1)..(454): n is g, c, a or t
caaattattaccatgagtataattttaagaatgaaaatgtttacagtattttcagttttattataaaaatgcacacacaacaaagattgtcatttcttggctctacttgcattcagcacttgttcttgagcagctttctttgcttttaccatctcgacaagttcctaggaagggagaaaggtgtgatttaagaagttgcgatttaaaaacagacattttaatctagtgtttggtgtaaagaattcaagcaactaagatagatagtactaaatatactgatttcattatctgccagggcctagaaagtttctaaggttgctcatttcttcctcataatattgaccccataactactggttttgaaataagcactatnattattaaccacttaatagacataaaatatgagctatatcacccaagctacaatttaaaatacaacaatctataaacg

SEQ ID NO: 480 - DNA, 517 bp, Homo sapiens
  misc_feature (1)..(522): n is g, c, a or t
cttcagtgtaaaacaagaatgatttccagggtttctatccagcaaaagtttaactgtgaggaagctcttttacctattctgtaaggaagtagatttatcagaactcttaatgaattgtggttgtgtttttgagtccaagagtccaacagtactataaatttaaatatggctttttaccagtctggtgagtgtattacattgatttttaagagataaacagtacaaggtagatctttactattgtgttttaaaagcctttgagattttattttctgggatgtgagctatctgaaattttttctcttattaacactcagagggctatatgtatctctcatctctacaagtttattttcaaaatgacacatcccagattgaaatgggcacttagcgaatacttgtggaccacaagacttgtctgagaacatgttcaaagacagttttcaaataaaaatttttcttaatcaggtccatatacagncttcaccccttgggcaacagaagaacagaagctttt

SEQ ID NO: 481 - DNA, 453 bp, Homo sapiens
gggagaaggtgctttattctgggatctgcgtaccaggctggctggggtgctggagtcggaaggggaatccaaggagcaaaccaagaaggtcctagggccagcctaggcctccacggcccggccgttgatgacgcggatgtggcggatgacgtcctggatggcttcagatgttgtgccctggcccccgatgtccggagtgtgcatctgtaggacacaggcaggctcggcacacaccaggccattctcattgtccatggatgccaggacagccttacggatggaggtggcataggagtgcagcttgaggtggtccagcatcatgcagctggccagcagggtggccgtagggttggcgatgttcttattggcgatactcttgccggtgttccccgtagccgttttaaacaccgcgtacccatggccatagtttggcccaggcacaaggcctgggcc

SEQ ID NO: 482 - DNA, 468 bp, Homo sapiens
cggaggtctcactttccgtcatggcgctgaaggtagcgaccgtcgccggcagcgcgcgaaggcgtgctcgggcaagcccttctctgccgtccctgggaggttctaggcgcccacgaggtcccctcgaggaacatcttttcagaacaaacaattcctccgtccgctaagtatggcgggcggcacacggtgaccatgatcccaggggatggcatcgggccagagctcatgctgcatgtcaagtccgtcttcaggcacgcatgtgtaccagtggactttgaagaggtgcacgtgagttccaatgctgatgaagaggacattcgcaatgccatcatggccatccgccggaaccgcgtggccctgaagggcaacatcgaaaccaaccataacctgccaccgtcgcacaaatctcgaaacaacatccttcgcaccagcctggacctctatgccaacgtcatccactgtaagagc

SEQ ID NO: 483 - DNA, 337 bp, Homo sapiens
cattgcatgctacataatacactgtaaccttctagcaggggtagatggccataactgagttatttttttcatcaatcaggaaaatgcttccttaatcaatgttctccaaaccctttgacacatagtaacgatcaactccagagatgcgcctatctctttccatcagactccagtgatacccaaaatgagcaacccttttttccttgcccccgttagtgaacctgtggatgtacgcagtagccagtcctggaatcaacaagcacacgcccatgacggagagtccggggagaatctcgaaccacatctctgccccgttacctaggccaaaaccctactt

SEQ ID NO: 484 - DNA, 333 bp, Homo sapiens
tcacctttcaaggacccagaagtagggttttggcctaggtaacggggcagagatgtggttcgagattctccccggactctccgtcatgggcgtgtgcttgttgattccaggactggctactgcgtacatccacaggttcactaacgggggcaaggaaaaaagggttgctcattttgggtatcactggagtctgatggaaagagataggcgcatctcctggagttgatcgttactatgtgtcaaagggtttggagaacattgattaaggaagcattttcctgattgatgaaaaaaataactcagttatggccatctacccctgctagaaggtta

SEQ ID NO: 485 - DNA, 490 bp, Homo sapiens
attcagtacagatgcaaagtagtagctcagaggctctgggtaatagcattcctgagattgatgacatccattacctcactagtccaacttctccagactaacgcagacttttctcttcccttggcctttcctctcctcgccattgggccaattccttcgatttctcatttcccttgaagttagggccattcacagtttcatggtcaaagccagttccaggttcaatagtctgtgatttatccaggctctgaggtatgcaccgcttctgttttgctcgttcctccaagagctagtttggccagaaaggggatgctttataccatagaacacatccaccttctagaacctgctctagaaggccaggccctcagattccacatggttggagttctggccaagtctggagctttcttcacactcggctctcagagctctgggttcagaaaaaactgagcatggtgagagaagacagtgtcagaccgaggccccc

SEQ ID NO: 486 - DNA, 498 bp, Homo sapiens
agctggaacctctgagtcaggtgccctagggcaaagactaggcccctcttcagagcccaccttgctgggtgatctctaggacccaggagcagagtggtggacaggaccatgccctcctcagaactggagctgccacaggggcagttgatgaggcagaggtttgaggatcccccctctgctaccagccccagtatcaccttccccatgctcttgtggctgtggactaagggagaaggattaaggggtatggctgaattcccccggcaccccttgccctcaggttccttcttcctttccctttggttaatcctgcatgggattagctgaccatcctgttttccatcccagagcctcccaaggctgggaaagtagggctgaagggctagatgtttggtctcaggaagtggggcccacccattcccagaaggagcttctttacctcttagccctgaggtttcctccttcccatcttctgtgcttccagagaacaactttgtt

SEQ ID NO: 487 - DNA, 352 bp, Homo sapiens
ctccttcaggggcatttatttcccggtcagaaaagaagcagggacaggcgcctctgcctgagcctggcagacacaacacgaagaccggggatggggcgggggaggcacaggagacggctctcagcaatgtgtgcacttggtcccttgtttgttcctggctgggtcagggaaggcctgccgggggtggtggcactgagagcctgggggaacaggcgccaggccagtggccacgggacggcacggacggaggcaataaatactgatggccaggcggggctcctggctgggcccaggtggggtgggtgaggctgtccatcgagggctcttgggggggtgtgggctctgggcactg

SEQ ID NO: 488 - DNA, 430 bp, Homo sapiens
gcgtctgctgctccggggtggagctggggtgtgggatgcacggcctcgtgggggccgggccgtcctccagccccgctgctccctggccagcccccttgtcgctgtcggtcccgtctaaccatgatgccttaacatgtggagtgtaccgtggggcctcactagcctctaactccctgtgtctgcatgagcatgtggcctccccgtcccttccccggtggcgaacccagtgacccagggacacgtggggtgtgctgctgctgctccccagcccaccagtgcctggccagcctgcccccttccctggacagggctgtggagatggctccggcggcttggggaaagccaaattgccaaaactcaagtcacctcagtaccatccaggaggctgggtattgtcctgcctctgccttttctgtctcagcgggcagtg

SEQ ID NO: 489 - DNA, 513 bp, Homo sapiens
  misc_feature (1)..(513): n is g, c, a or t
aagttccaccagctttttattgtttgaataacagaacacacaaaaccaggcagagaagtccgcaagangatgatgatcatatttcactgttttttggccttttggtccttcatctttcaagcacttactgtattttcctttagcgatttaaacatttattttgatcacaaatgcaattcaagtgtgaataaataaacgtattatcttttagcacccttccccgcttgttcctttaaatagaaaaaagtgctaaatgtctctttatagcctattggccatagctgtcccacctatggttttaaaaacagactgtaacttgatcttctgaaatccttctcgaaccacaactcgttctgttaaagaaatcctaggaaagaagtcctactgttattgtcgatagtctccaaaaggtgaggaaggtaactgagttgaaggcaactgggaggggtcttctgcaaactgaggaccattgggaaactgtgcagaggcaaatcttgttcacaagatacccgc

SEQ ID NO: 490 - DNA, 351 bp, Homo sapiens
taaagaaaacaagttttatttttatcatcagaacattctaataaaaatattatgatgagattagctacctttattctctgagccttgactctgtcccaggcctgccctggagcgcctgcacgctcagctccctgaggtaggtccggaggagaccccccgcttgcccccgccctcggccaggatacctctcacctcatgtcccctcctccagacccccacagccctggatgccccatagcagccctgccacggctggcagaactgcctccaccctccaccaacccccaagacaggcaggaaccgtctcaggctggcacacagcaggtggtgcgggggtagagggaagaggcg

SEQ ID NO: 491 - DNA, 454 bp, Homo sapiens
ctgaaacaagaagttaatggactgtttattgtaacttgatcctcccgagctgtgagcgcagtctgaggtgtgaggacacggcctcctgttggagtcccattttctccatcagggcacgtgggcggcttcctcaagcccggagagctcccaggcgcacaggggccgccggtaacaggggccgccggcataaggcccgtttccagtcatagcactgaagttgcaacttttttcttgtaattgttttgctactaagataatttcagaagttcagtctattttttcagcggatactgccgccaccaagaatccaaaacctatttttgacttggagagacttgcttttgttggttccgcccgtggagacgacgatagtgtttctgtataataaagtgtctgccggctcgcgggccaggatcctctcggtgggatgggcacacagacaggaggcccctca

SEQ ID NO: 492 - DNA, 424 bp, Homo sapiens
tttttttttttgcaaaaaagtggcggtgttttaatcaagtctcattacaacggcagaattaggaatgagtcccacctagcttccacatgcgtgggcagcagctgtcacacgggcctgtcgtggcactcagcccatggcacagacatatgtggctcagggcaagaaccagtggatggggctctgcacaggaacgctggcctcgggatgggagacccggcctgcccaacactgctcagagcccctcccaactctgacaacaggctcgggtcaggactccccgaaatcaggcaccctcctgccccactgctgagatccccaacgggccagacctagcttggaaactttcttccacctggctggccaggaaggcagcaaacagagatgatgactcggaatgatgggctattcggaaatggctagggaa

SEQ ID NO: 493 - DNA, 353 bp, Homo sapiens
gtcgtgttttcttaactctgcttctgtcttgctctcccctcccctggctttcctctctgcctgctcctgtctctccctggggtttctggtggtggaaaagctcaagcctttgcgaacgtaatgacctgcctctgtgcgaacgttacgggaggctggacctcgacacagactctgctgatggcctctcggcccgtctgctggcgtccccggagcccagtgctggccccctacaggtggcagcccctgcccactcccatgctggtggccctggcccactgagcacgcctgagcctccggggccacgcttcgttctcaggaacaaaacctgaggcagccctttggatgccctcaca

SEQ ID NO: 494 - DNA, 300 bp, Homo sapiens
gcgctggcggcctggctgctcggcaggcggaacttgtaggaacgcggggcttcttggtggggccggagccgagacccagcctgagcgagcaacaggttggtgaaaaccctgtgtccttggagaaagctggttcccgttttccagagggggagcccagagcttgaaaggccgcggttggcacttcgagaaggaagtggagagtaaagacagcgcctggagcgatcgtagaaacacagaatgggactggggaagccctttggaaatccagctgcagaaacagacaccccaatgctatttaca

SEQ ID NO: 495 - DNA, 386 bp, Homo sapiens
gatataattcatttattataaaagggaggcacgaaaattgtttacatgatgaaagatttcagaacttcagtggaatgcacgagctcatgttgatgctatttcaatagtgatctattttagtctacgtacttcccaagaatgtcaccatctctaaataagaaataattcctgtcacctagcaccactttggtgcctgcatattctgggagaagaactttatctccaactttcactacatattctggcaccaaagttggagaagaactttatcaccaactttcatgctaactggttgaatctcttcaaccttcactttagagcccaatccaacagctactactgttacttgcaatattttttcttgagatatttctggaagcatatgc

SEQ ID NO: 496 - DNA, 509 bp, Homo sapiens
ttggggatgatagaaatgcttagatccagctctgggttacaagagaaagtcagactttcccagaaattctgggaagtatggagagattcatgggatgagctcagcacaggataccagagtgtcttggcatcagcagcatgagagcaaagtatgagccttgatggcaggaatcatggcagacaagcatttagaaagtttattctgctctttggccaagtattggttaaaaggaaagcagttgaaactgtaaccaaagaaggcatatgcttccagaaatatctcaagaaaaaatattgcaagtaacagtagtagctgttggattgggctctaaagtgaaggttgaagagattcaaccagttagcatgaaagttggtgataaagttcttctccaactttggtgccagaatatgtagtgaaagttggagataaagttcttctcccagaatatgcaggcaccaaagtggtgctaggtgacaggaattatttcttatttagagatggtgacattc

SEQ ID NO: 497 - DNA, 539 bp, Homo sapiens
ttttttttttttttttttttttttttttttggttttttttttttttgccctgaaatttgggtttattcagctccacccaaaactaaaccaaggctatgacatgtcccatgggaccaaaccatacattggggaccatgcacctttcccttcccccaaggatgctgctacctttggaggggggggcagctgcccatatcaccttgggaggtaaaaagggatttgctgggtgctgggtctgtggcaatcagggctcaactatggctgcctcctccttttcctctggatcaggaggcgcagggagcagggagatgtaaaccttattgacctttgtgtccaaatgtcggccaccccgaggtgcttccaggtttaagatgccatcatgggagagagcagcttggactcgccaggggtcgacatcagcaggcaggacataggtgcggcagaactctctggacacgaatgccgtgcggtccaagcgctggggtgccgggcagacaccttcagcaggtattcacagtcctcacagtcacctcgtctgg

SEQ ID NO: 498 - DNA, 335 bp, Homo sapiens
  misc_feature (1)..(336): n is g, c, a or t
agggaaggaagcaaagcgggaacgcactgcaggccccatccaggtgagcccctcagggcgntgcgcccgggggcaacgatctcggggccttgggttggctcggatggtggcggctgcgctgccctagccgttgtcgctcctgctgaaggatgcctctgttggccctggcacgtgcccggcgttcgttgtagaaggctgtgatgatccgatccttttcatccatgaagttaaggtgcatctgcttcaccttcctgaaggcaatgtagtgcaggcccatgcccgccagcatgaggaggaggcagtaccccagcacttgtttgttttgtttgtgttgc

SEQ ID NO: 499 - DNA, 348 bp, Homo sapiens
gtaacgaaagaggctttgaaaatgtagaactgggagtcataggaaaaaagaagaaagtcccaaggagagtcatccactttgttagtggtgaaacaatggaagaatatagcacagatgaagacgagttgatggcctggagaagaaagatgttttgcctactgttgatccgacaaaacttacctggggtccctacttatggttttacatgcttcgggctgctacatcaactctctcagtgtgtgacttccttggagagaagattgcatctgttttgggtatcagcaccccaaagtaccaatatgccattgatgaatattatcggatgaagaaggaggaagaagaagaaga

SEQ ID NO: 500 - DNA, 412 bp, Homo sapiens
aataaatacagaaagcatcttgatctcttgtttgtgaggggtgatgccctgagatttagcttcaagaatatgccatggctcatgcttcccatatttcccaaagagggaaatacaggatttgctaacactggttaaaaatgcaaattcaagatttggaagggctgttataatgaaataatgagcagtatcagcatgtgcaaatcttgtttgaaggattttattttctccccttagacctttggtacatttagaatcttgaaagtttctagatctctaacatgaaagtttctagatctctaacatgaaagtttttagatctctaacatgaaaaccaaggtggctattttcaggttgctttcagctccaagtagaaataaccagaattggcttacattaaagaaactgcatctag

SEQ ID NO: 501 - DNA, 369 bp, Homo sapiens
tttttatggtgccaattttaaatagttttatttaagacattgcattttccacttacaatacagtgtttataaagtgcaatgttatttccttcccctgtgcatatgttccatattcaagtattgagaatgcccagtaacttactatagcagcttaactttttaaaactgccacagaatttgctacgaatttaggtccttcaaatgttttaaatgtgtggaacaatgctacatctacacttggttggcttaatcaacctcttcaatggtgggccctgaggaagcaccaccagagggaggagctccaccaccaggaaatcccccaggcattcctcctggcatgcctcctgcactctggtacagcttggtgat

SEQ ID NO: 502 - DNA, 252 bp, Homo sapiens
  misc_feature (1)..(252): n is g, c, a or t
tacttttcaggtttaaatttatcttttttcttctaaaagtatgtttttatcttctaatttccctatcttctctatncttttcttcgccttcccgtacttctgtcttccagttttccacttcaaacttctatcttctccaaattgtttcatcctaccactcccaattaatctttccattttcgtctgcgtttagtaaatgcgttaactaggctttaaatgacgcaattctccctgcgtcatggganttcaagg

SEQ ID NO: 503 - DNA, 433 bp, Homo sapiens
  misc_feature (1)..(433): n is g, c, a or t
aaaaggtttctaaaacatgacggaggttgagatgaagcttcttcatggagtaaaaaatgtatttaaaagaaaattgagagaaaggactacagagccccgaattaataccaatagaagggcaatgcttttagattaaaatgaaggtgacttaaacagcttaaagtttagtttaaaagttgtaggtgattaaaataatttgaaggcgatcttttaaaaagagattaaaccgaaggantntaaaagaccttggaaatccatgacgcaggggagaattgcgtcatttaaagcctagttaacgcattttactaaacgcagacgaaaatgggaaagatttattggggagtggttggatggaaacatttgggagaagattagaagtttggaagtggaaaaccgggnagacagaattacggggnaggccgagaaaaggatt

SEQ ID NO: 504 - DNA, 178 bp, Homo sapiens
tttttttttttttttgctttgtaattagtatattaaggagacaatacatttcaagaattgcttaaattctgatacccagatttaagcatgtgaacatatgagacttttaaacatacaattaaagctattcatcataatttgctatactaccaacataactttggagcgaaagtcaaat

SEQ ID NO: 505 - DNA, 64 bp, Homo sapiens
ttttaataaactatagtagtgttataaaaagttaaatgaaggataaacgccaatattaaagctc

SEQ ID NO: 506 - DNA, 332 bp, Homo sapiens
agctcgggtgctggaactcgacgtggtcgcgctccggcctaagcagggcccctgctcgatgctcaccaccttccgaaaaccgtacatgttgagttggcgcacgaagctcgccatgttgctatgcttgaaatactggggcagcacttccttggcgaaacggctctggtcgcttacgaggaaactggtcccgctcgggctccagcggatcaggtggtctgtgcctgggtcccccaccagcgcccatagcttgccgaggaaggcaggcacggggctggtgtctgagctccgtgggcagcgcactgcgcttcctgcatggtgcagtctcggcccgg

SEQ ID NO: 507 - DNA, 563 bp, Homo sapiens
  misc_feature (1)..(562): n is g, c, a or t
atggcatagcgcaggcntcnggccatgaccagctggctgagtacgggggcagcctcagctggaagaagcaggtctgtgaggtaggcagactgtcgtaaggcctatcaaccttcatgatttgaaatctctgagaaatgtcagcagtgttggctggtagtcgagatcttcctgacacaaacctcatgaaaagcacccgctcctcattggagaactcttccagcgtgtgccagaaccactgcaccagctgatgctgctcatccacctcacggtaccgcaccactttcttcaagacttccacagagatctcgggcatcccacacaccatctgctccagttgttttgctgtgaggagggacagcagcggcacaggaacaatccaggacatcccttctcggactgcagccacctgtctggtccatctcatgaagtcgatattcaatgggccctctccacatattccttcctgttggaaaatgtgagtgggatactatttccaccagggattataggaaccattttgccatcagcactctggccaacaaaagaatcagangaatcatctc

SEQ ID NO: 508 - DNA, 504 bp, Homo sapiens
  misc_feature (1)..(504): n is g, c, a or t
gtggatctgctctacgtgcagacctctcaacagcattcttcacattgaagacagtgggattaccgaggagagtttccatgagatgattcctcttgattcttttgttggccagagtgctgatggcaaaatggttcctataatccctggtggaaatagtatcccactcacattttccaacaggaaggaatatgtggagagggccattgaatatcgacttcatgagatggacagacaggtggctgcagtccgagaagggatgtcctggattgttcctgtgccgctgctgtccctcctcacagcaaaacaactggagcagatggtgtgtgggatgcccgagatctctgtggaagtcttgaagaaagtggtgcggtaccgtgagttggaatgagcagcatcagctggtgcagtggttctggcacacgctggaagagttctccaatgaggagcgggtgcttttcatgaggtttgtgtcaggaagatctcgactancaagccaacactgct

SEQ ID NO: 509 - DNA, 300 bp, Homo sapiens
  misc_feature (1)..(300): n is g, c, a or t
cgcaacaaggagagcccagtcttcgcccctgtctacttcccagaagagctgcaccgcaagctgccctggagcaggacctggccttctggtacgggccccgctggcaggaggtcatcccctacacaccagccatgcagcgctatgtgaagcggctccacgaggtggggcgcacagagccgnagctgctggtggcccacgcctacacccgctacctgggtgacctgtctgggggccaggtgctcaaaaagattgcccagaaagccctgggacctgcccagctctggcgagggcctgggcttt

SEQ ID NO: 510 - DNA, 408 bp, Homo sapiens
  misc_feature (1)..(408): n is g, c, a or t
caatgttgtttattatttcacacaaaagttagaccaaggccacagtgcgttaaacacctccctccccacccacgcatggctcaaaaaccaccccaaccctgctataaaaacaacagaacacaacaaaaatactgcatttgaggctgagcaggnacagagtngctccaacaaaantaagacaaaaacacaagacacaacatcttttcaggtttgtgtaaaatttgccatggcccacggggaaagtggtcatggccgtgtcaacaaggatacttgaaactcagggcttttggaggtttgagacagctgccacattagggtgtcttccaggggtctgctggcagggaactgnggatgctgnaaggggcaggggcttgatcccttcggccccctctgaagttttagggccat

SEQ ID NO: 511 - DNA, 582 bp, Homo sapiens
tttgctctagcatctggcttttattggttgcctttcttaaacccagcattttttaaaaagtcacctgaggtggtagtttagtcagggctggagaaaggggtaggccagtggtcagtcgggaggagggtaccggtgtggcatgatgggtgcttcacatgtagtaccaggccaagagtccagcagctagggccacaccagcggccaggatgaactggaggctgggcttcctcagcacagccatagctgttcggaagggacagctgctgccctccagggaagcctttgtcttgttcagcagcgtagaaagggcatttacgcatgtctcccttcccatcgtgtacagggaacccatcctccaaggtctctctggccagtgtgggaccggcctggtccagttcattgaatatctgcatgttatactcaaaagccttgttggcctcctccacgatcctctctttggtcttcatgttcagggtcagggcgttcatcctggcccgtagagctgcttgactgctggcattgtcacattctcaaacagtagaatgggtcctcccctgtgctgggaatttcatgctcgtgggc

SEQ ID NO: 512 - DNA, 488 bp, Homo sapiens
  misc_feature (1)..(488): n is g, c, a or t
gtcattcaaattttctttgctgggtttgaatctgcatttaggttgcgggcctggcaggttcaaacgttaggctagacgagcaaaatcacactcctaatccaatgaactcagacaaccccataccatgttggttgcactcctatagaacaaccatttctgaagaccagctctgcctaagtctgtaaccactggtggtggtagtactgagacaccatacaccttcgtggcatggtagaacagatgagaaagttcgatcttaaaagatgtccgctcaatggctcaaaatcactatgctccaaaccactaaacagccaagcacagcgnggatggtcatggattgaaggtgtgagatccagtaatgttttcctgctcatcatttgtcttgccaagtcgccgccctgctgaagtgtgtgtctccaaacaaagtcagaatgcaggtgagctaagtctttggtttctttggactataaataacgcttttttttctt

SEQ ID NO: 513 - DNA, 374 bp, Homo sapiens
tattatcaccagcagacactgccgggcctcccacccgggggcactgcctgaaggcgtgtgtgggcatagcattagctgcttcctcccctcctggcacccactgtggcctggcatcgcatcgtggtgtgtcaatgccacaaaatcgtgtgtccgtggaaccagtcctagccgcgtgtgacagtcttgcattctgtttgtctcgtggggggaggtggacagtcctgcggaaatgtgtcttggggtttggccccttgcccccccaaatttttttgttttggggggggggaaggaaccaaccaaaaacaatgccatcactggaatttccaccgctttgtgagccgtggtcgtatgacctagtaactttgaccaattca

SEQ ID NO: 514 - DNA, 311 bp, Homo sapiens
gacacggctcacaaagcggtgggaaattccagtgatggcattgtttgttggttggttccttttatccaaatggagacaagacacatttccgcaggactgtccacctccccccacgagacaaacagaatgcaagactgtcacacgcggctaggactggttccacggacacacgattttgtggcattgacacaccacgatgcgatgccaggccacagtgggtgccaggaggggaggaagcagctaatgctatgcccacactcgccttcaggacgtgccccgggaagaggcccggcagtgtctgctggtgataa

SEQ ID NO: 515 - DNA, 716 bp, Homo sapiens
  misc_feature (1)..(716): n is g, c, a or t
tttttttttttaaaacttttaacatttttaattaaaaaacccacacaatcttaggttgggcatggagagggtggcatgtcatatgatggggttgtcccttggggtgtgctgaatgctgcttggggtttcttcctgagccagcgctatgggagctgaagatgtagggctggccttctcccctttgtgggccccttggagnnaggcttgggggctctgtctcttgcacctgctgcgagggtccatcccagaatcacaagccactcagtgatggtatgggagagaaaaggtctctgggggtattcaaagcttgggacacctcctccatggagccccctcccattgctccctgggcctcttgagcctcaggcaagaaaatggccaggactgggtgatgagcagcccctggctgcntgtttggcccaggtctaggtctggtcaagctgttggagctgcctccccacacaggatgagttcccagggaagtgaggccacagcaggatccagagggcaccccttcccagagcctgggcccaggtgagggcaacagctctgacagtgtggaaatgcatcaaagtcctgagtgagcaactcccttctgggaagattgattccagcgagaaaggtgtggggtttcagagtctccgttcctgctcctgccgaacccgttaggccctgggttgttccaccgaaaaatgaggaaaaggcccgtttttccc

SEQ ID NO: 516 - DNA, 461 bp, Homo sapiens
  misc_feature (1)..(461): n is g, c, a or t
tactgtattgggtagcacaggtatatagtaaaatatatgttcctggaattgacaaaatggaatgaattccaggggctggatggtagtgaagacttcacagggtagccagggcttcaagctgagttttatatttattgatggattgattgattgattgattgagacagtctcactctgttgcccaggctggagtgcagtggtgcgatcttagctcactgtaacctccatctcccaggagattctccctcagccgcccgagtagctgggactacaggcacctgccaccatgcctggctaattttttcatttttagtagagatggggatttcaccatgttggccaggctggtctcgaactcctgggcctccggtgatccacctgcctcggcctcccaaagttgccgggattaacaggtnttgagncaccatggcccagcccaatctgagtttttagaacagatg

SEQ ID NO: 517 - DNA, 456 bp, Homo sapiens
  misc_feature (1)..(456): n is g, c, a or t
caggacatccaaatggagatgtacaggaggcagttagagaaataggtcatgtgcttgggagaaaataatagtccagaaatatcaatgacatgtttaggaaacttattgtgtgtcattgagggattaacaaaagtgtgtgtgtgattttaaatcctcaatacagatactttacttgtgaaagaaccagtggctgtccttaaggccaacagagtttggggagcattacgaggtttagagacctttagccagttagtttatcaagattcttatggaactttcaccatcaatgaatccaccattattngattctccaaggttttctcacagaggaatttttgatttgatacatccagacattatctggccagttaagattattcttaaaactctgggatggccatggctttttaatnaagttttatgttctttcactgggcacatagttggatgaccagt

SEQ ID NO: 518 - DNA, 429 bp, Homo sapiens
aatgagctttttgaattttatttctcttttaagttctgatgaaaagaaagggccacaagaaagttttcttatattgtggttcttggtgtaagatgagcgcttgctaaatgccactttcgttccaagtcatcttgtttgcttgcagactgccactggagacaccattgtctcatccaagtccagtgcattagctgcagctcgtagacgcgaacgggagggagaaaagaagcacagacaaaacaatgaagcagagagacttttattggctggagtggagattccagaacctgttttcttctgtaccatagaacccccatcactgtctaagcagccaggtataaatggtcttagtgtgtcaactaattagtgcgctgataatttatataaaatagttgcaatataccctcaagagatttcttatgtgattga

SEQ ID NO: 519 - DNA, 308 bp, Homo sapiens
ggtaaatgaagctggcacacggccacacagctacagcattgatggtgcaggcgtccgtccgcggacacggcataaggagcggtctgtgacgccccagcacctctcccgtgcagcccctgtgcttgtcctcctggcatcttagggcactggtttcctgcattcgctttgctccccttgtgcacgttctgtcttcccagaagaagagagttagggaattataaggagagcgttcttccatgcgcatatcctcttctcagtttattcattgatgcagaaagcaggcagctggtcaccgggtgtgctgacgg

SEQ ID NO: 520 - DNA, 470 bp, Homo sapiens
  misc_feature (1)..(470): n is g, c, a or t
gcggtggctgctgagcccgccatgtaaaaataactaaacatgggcaaaggagatcctaagaagccgagacgaaaatgtcatcatatgcattttttgtgcaaacttgtcgggaggagcataagaagaagcacccagatgcttcagtcaacttctcagagttttctaagaagtgctcagagaggtggaagaccatgtctgctaaagagaaaggaaaatttgaagatatggcaaaagcggacaaggcccgttatgaaagagaaatgaaaacctatatccctcccaaaggggagacaaaaaagaagttcaaggatcccaatgcacccaagaggcctccttcggccttcttcctcttctgctctgagtatcgcccaaaaatcanaggagaacatcctggccctgtcattggtgatgttgcgagaaactgggagagatgtggaataacactgctgcagatgaacagcagccttatg

SEQ ID NO: 521 - DNA, 473 bp, Homo sapiens
  misc_feature (1)..(477): n is g, c, a or t
ataatttctattctgaaagaggatgggattaattcacttaatttcaattcaacaaaatgtacctatgtatttatgtatgctatagctaaaataccattagtgtgtgtagatgatagatagataagatagacagacagatagatagatagatagatagatagatagatagatagatagatattccctgccttaacaaatttataatcaagagttgaagtagaaatgtataaaaatactataaaacaaggcatattacaattactcaaagcataaataaacaaggtgctatgccaatttaaggagatagcaataaattccaaccaggtgaaaaagaaggaaatttcatttccttcagaaatgaaatgaatttgagttatgtctaagtaaagttggctcctgtccctaactgcaagctcccctacctgtggtcacgttcatggcttcagctggtccgcatttccggtgtccatgng

SEQ ID NO: 522 - DNA, 481 bp, Homo sapiens
  misc_feature (1)..(488): n is g, c, a or t
gctaccatacacaagaaattaaaaaaaccattaaatatttaggaacattcaacatcagaagctgtaaaatctaactgtatgagtagcccatcaaaaagctacaacctgcattttttaaaagtattttctctacagagaatcttatcagctatacaaaaatctgtacagtttttatactgaagctagtattgagctgcacttgaattcacattcttagcaaaataattgcctgagcacacacacacattccacacgcatcattaaaggatagccatttattcttcatcttcatcctcttcctcctcatcttcatgtgatctctgcacatgccagctctccttcaccctcntaccatgagtgggacacagcctgagggcctcaccagaagctggaatagatgccgggcaccaggcttcctgtacagcccggcagaaccatggggccaaacagacctcccccccttaataaatttacccagcct

SEQ ID NO: 523 - DNA, 429 bp, Homo sapiens
  misc_feature (1)..(429): n is g, c, a or t
gtgagcaagntctgggagagtcacctcaggctcaggattctgaaccattgagatcagaaaccagatacttagccttctactgtagctacggaaccagattctggtgaatttgtccacaatcagccattggctgtctggggagtttttggaagacagcaaagaggggcaatggctgctttcagctttgaggacagatgctatcctaagggcatggcagtacccatgttgatttgacatctctctagcccatccattgcttacagtagaagagtgggggctgtatgcttgataatcttgaacatttgaactttaataggatganttgacaaggtaggagatctggatattttngagattttgggagaccnttcctgttgccagattcantgctctattcccntaccntgccagggaggctgttttaggagt

SEQ ID NO: 524 - DNA, 549 bp, Homo sapiens
  misc_feature (1)..(549): n is g, c, a or t
tacattnggtantttatttaacangttatccaaccactttctaaaacagcctccatggcacggtatggaatagagcagtgattctggcacaggaaatggtctccaaaatctcaaaatatcagatctctaccttgtcaagtcatctattaagttcaatgttcaagattatcaagcatacagccccactcttctactgtaagcaatggatgggctagagagatgtcaaatcaacatgggtactgccatgcccttaggatagcatctgtcctcaaagctgaaanagccattgcccctctttgctgtcttccaaaaactccccagacaggccaatggctggattgtgggacaaattcaccagaatctgggttccgtaggctacagtaggaaggctaagtatctgggtttctgatctcaatgggttcaggaatcctgaggcctgagggngactctcccagggccttgctcacactcgnggccgaattcctggcagcccggggggatccactaggttctaggagngggccgccancggtgggaggctccagcttt

SEQ ID NO: 525 - DNA, 325 bp, Homo sapiens
tcacatagaaagtcttagtttattttggtagacttgctttttataggcattggtttaaagtgattcttttcagagacatcctttgagaagttaaaattgcagaggcttacgctttcttttatttcaaatatgcatagtgattaaccaggaataaggattctcccatgttctgcctgttaagagcaaacagatctggagaacggaagcccaccctgcctcccttttccatctgaagcagtgcgaggaggctggctcctctctttgttccagactccagggcaaggggcgaccatgctgtatatgctgtgccttgggggaccccaga

SEQ ID NO: 526 - DNA, 446 bp, Homo sapiens
  misc_feature (1)..(446): n is g, c, a or t
ggcggcggggcgtgaagtcactgctgctctgggttcgggttggcgactgaaggcggtaccggcctcccggaacagcccgggggagggcttaggtgcagaagggcaggctggcggcggcggtttggtctggggaccacgggctggagcaggtggaaatttaaaattgtttacagtcaacactgtttccagccatgggtttgtctccatctgctcctgctgttgcagttcaggcctcaaatgcttcagcgtccccaccttcaggatgcccgatgcatgaagggaaaatgaaaggctgtccagtgaatacagagccatctggccaacctgtgagaagaaaacatactctgtgcctgcccaccaggaacgcgcctatgagtacgtggagtgtccattangggcactgcggctgagaataaggagaactagatccttcaaatctgatgcac

SEQ ID NO: 527 - DNA, 390 bp, Homo sapiens
tttttttttttttttttttctggggaaaatagtttaatgtatcgctcagaaaaaaatagtttatatttttccatctgaaacagtgctttacgaggtccaacgccaccaagcgactttcattctgtcccatactgccgaaagtgaatctaaggcaggacggacgtctaggatggtgaactggtagtccttgttgacttcaccaccatcataataatcaatcacatatctaacttctgtcccgcaacggtttatgatccaatcgtgcctatcaaaaggcaactcataccccatccaggaacgaattcgtgcccttggtgaatactcttttgctttccctccaaaccggatcaatgatggaccacaaggacactctgcagcatgaagggcttc

SEQ ID NO: 528 - DNA, 403 bp, Homo sapiens
  misc_feature (1)..(404): n is g, c, a or t
tggtccaagctatggctcacagaacttcagtgcgccttacagcccctacgcgttaaatcaggaagcagacccaccaagaagcctgtcgctcccccgcatcggagacatcttctccagcgcagacttttgactggatgaaagtcaaaagaaaccctcccaaaacagggaaagttggagagtacggctaccatgggtcaacccaacgcggtgncaccaacttcactaccaagcagctcacggaactggagaaggagttccacttcaacaagtacctgacgcgcgcccgcaggtgggangatcgctgcatccctgcagctcaacgagacccaagtgaagatctggttccagaaccgccgaatgaagcaaaagaaacgtgagaaggagggtctcttgcccatctctc

SEQ ID NO: 529 - DNA, 508 bp, Homo sapiens
  misc_feature (1)..(510): n is g, c, a or t
gtatatttatttattacagacatcctaagacccgtaaactctgctctggatcatatcactccaggatctcagagctgttcatgattgtacaggaaatggggaatatcataggctcacaaaggataactgatagaactcagtgtggtactttggggacatcaaacattgtgcgacatgcaaaagactattcacgaataacacaaaatatacattcattgtgccatccatcacattaacaattgagctgaaaatacattatatccagctaagataactgtggaaggaagaaattggtttgaataatacttttaggttctgaataacccagcacaaattttaaacagagggtggccccgagnagaaaggggtagagattggggaaagacttagcacaggaagcccgggtttctggagtttgtgctctgcagggcttcttaactggaagaaccaatccagggctacccctntgaggcatctgattggggtttaaatgagggattttttcctt

SEQ ID NO: 530 - DNA, 415 bp, Homo sapiens
tcaaaacaattttgtgaattttatttttacaaaaattttttaaattcatattttaaaatgtataccaaggcaaaaaaatcatataagctatatcataaatacaagagtttcaaaacatacaagagacatataatgtaaaaaaaaattatatatatgaagtccaatgtaatttataatacaaaaaaatacagcaagggaaaatgctttagaaatgctcatctgcaaactacaaaacaaaatcctcctcttgaccgactgcatgaactgccatgaaatttgcagctccatcatactaggtatctcttctttcttcatgttaccttgtctttcttcccatttttcttttaagacagggtcttgctatgtcacccaggctggactcaaactccagggctcaaggaatcctcctgtctta

SEQ ID NO: 531 - DNA, 467 bp, Homo sapiens
  misc_feature (1)..(806): n is g, c, a or t
cacttaaatgaggctgtttttgacgttctctgccaaggatttagagctttcgttgaactaacataaaaggagtgcgagtcttagtagagatgttccgtgtgtgccgcccgtgctctgaactgcgtttccacctgctgtggtgcttgtgcagcctggcagttcattgtcatctttaataaactaaggaaataaaattctgtctttcgtcagcctgccttgactgtcaagaaatggnangngnncnannnnaaagcaggtatatctgaacattgagaaggtttctgtgttataatgtaaagcaaactggaccacacacatcaaggaaagtgaggtggagtggctgtgtctctaacttgccatgagacctcgagcggaaccacttcacttctctggggtttctgggtgcaatggtgtaactgtcactttaaaatggaggtgtcttcctctccggaacatctggacttggn

SEQ ID NO: 532 - DNA, 417 bp, Homo sapiens
  misc_feature (1)..(417): n is g, c, a or t
tggaggcacaaacacaatttatttcaatgtaaaggtactaccaaatgaaacagtttaaatgcttgtaacaaacgtgttatccaaaacagcacaatatgatgatgctaagacttacaaaattaacctaatttacagtattgtcaaacatgatttcatacaaacttgaataaacaccacatctaactaggtcaaacaactacccgagttcaaataattgatatggaagtattttggtaaagtgcccatagtgagagtttaaaaagcagcccctgttttctatagaaaaagttgtgacagtgaataactcatcacattctcngcaatactactcagcactccatatacactcagggggagcaataccctggacacatagcttatttcacattagtgaacaaactcaagatttttataaag

SEQ ID NO: 533 - DNA, 458 bp, Homo sapiens
tttttttttttttaagagtgttttcagtattttattaacaaatgagctggcaagaggacaagtgatctagtagtatcacccccaccctcatggagcagccaccacaagcccaccatggtgcggggatgtccaacatgctctgctggcccagttcccagccgatcccctgagtcttggcgcccgtttagtcacccttcagctgcttgggaggcaggaagagacttcccctcttcacgaggtaagggagacaaaagcagccatttggatgccaaggccacaggggcaagccatgccctatttctttggagggacagaatcacttcttcccaaggccagacactgtagcccatggtactcagccttctagaggagggtagcctagcagaggagaagccctgagtggaagcagcattttgaaggcatcgtcattcttagaccagctaagagctgagggcatt

SEQ ID NO: 534 - DNA, 237 bp, Homo sapiens
ttactgttcagaagtctcccacttttcatacaaaaatactgtgctactgatacagttgaaaaaattcaatgatgtctctcctgcaggagaaattcacagcatccccagggtcaacatgaaatctggccctgtccccgccactgggggctccccaggcctgcgttcctgataaactgggacaggttttccaggcactgaccaactatccaccaagggtcctctgcctccaagacagac

SEQ ID NO: 535 - DNA, 217 bp, Homo sapiens
tcccatagttgcttttatttttccctaaaaaaaagagtccattttcttatacagacattcatttatgtaagacccacatcaggctttttctaaagtgccaaaacccgtgcaatccccataacttcaggtgagaattataatgggcagaagaatgtatcaactaaaatactcaaggccatctcaaatcctgaagagtccctggtttctgtgacaaggg

SEQ ID NO: 536 - DNA, 596 bp, Homo sapiens
  misc_feature (1)..(596): n is g, c, a or t
ccagattggtacatgctctccctctttggcactggagctattctgatgcgtggagaggctgtactattaatgacatgtgggaccaggactatgataaaaaggttacaagaacagccaatcgtccaatagccgctggagacatttcaacttttcagtcctttgtttttcttgggggacagctaaccctggcactggtgttcttctgtgtctaaattactacagtatagctctgggagcaggatccttacttcttgtcatcacctacccactaatgaaaagaatttcatactggcctcaactagccttgggctntgacatttaattggggangcgttacttggatggtctgctatcaagggttcctgtngatccatctgtttgcctggcctccttaantttcccggaagttatgtngacactaaatatatganaccanttatggccntcagggacaaaagaggatgatgttttgattgggcctaagtcnacggntctgngggttcggagaaaatancaagccgngggtccagtggcttcagtggttgcaangctggggggnaactgagcctantgggtgggaaaaantgggcaaancg

SEQ ID NO: 537 - DNA, 429 bp, Homo sapiens
  misc_feature (1)..(430): n is g, c, a or t
cccaaacgaaaataaaactttcatttgccaagggaacaccacagcagctcctgccctgtactgagctctccaaagactgggcaggcaaagtccctctggccccctctggaagtggaaagtgctcgccctggaggacagcaacagagccaaggtgaggtcctgctcaaaggtgggcagggggctgcgctgactcctttcggcccttgccagcgatgggccggcctcgctcctcccagatggtgaggccatcgcaagagcagatctgcttcggggttctggaaaaggccagcgganttggcaaatgattgccacaggcaacctctccccggagttccctgtgatctttggataaagggatggcctccccgggcccaggtcatcttcttccctcatcaataatcaggctggnggcaatcacatcccacacct

SEQ ID NO: 538 - DNA, 318 bp, Homo sapiens
  misc_feature (1)..(318): n is g, c, a or t
ccactagtaatattttannttcttcttacaataaattataaatactttttccacatatcaaagttcgtcaaagaactcccaaaattaatcttcttcattcttcaggaattatttattcacacagcagaccaccatttcatattttaaatcctagggctctcatgcattccttgtgggcctcaattagatgtccacagtgttcttctcctttctcgatgatacacgcatcggcgccttcttggtctccgggcaagcgcagaggggcttcagcggcttcttctcctgagactcaggcggggcagggtttgagtcaaccaa

SEQ ID NO: 539 - DNA, 390 bp, Homo sapiens
  misc_feature (1)..(400): n is g, c, a or t
cgaggctggcatagatttggctgtctccgctcatagctgcttttggcgcgaaagatgccgggtctggttgactcaaaccctgccccgcctgagtctcaggagaagaagccgctgaagccctgctgcgcttgcccggagaccaagaaggcgcgcgatgctngtatcatccgagaaaggagaagaacactgtggacatcctaatttgangcccacaaaggaatgcatgagagcccctaggatttaaaatatgaaatggtggtcctgcctgtgtgaataaataatttcctgaagaatgangaagattaccnttggggagttcctttgaccgaacctttgaatattgttgggaaaaaagtaatttaataaatntaattgtaagaaagaaaagta

SEQ ID NO: 540 - DNA, 207 bp, Homo sapiens
actgggaaactttagaaacagccatttattatttggattaaatgtgtgatgtgttctgcaatttggaatacacttttcagtttatagccagtctccacatgagcagattcataccattgcaatacacaggagttcataaataagattctactcaggtaggcagtaactagcaagttttgagtcaacaaagtctcagtattacatagt

SEQ ID NO: 541 - DNA, 262 bp, Homo sapiens
  misc_feature (1)..(300): n is g, c, a or t
tagcaattacagtacacaggaattgttacgatttcctaaacttcatgatgccatagttgaagtggtgacttgtcttcttcgtaaaaggttgcctgttacaaatgaaatggtccataacttagtggcaattcgaactggcttatatcaacacaaaacatccagactttgctgatgcttgtggnctaatgaacaatantatagaggaacaaaggagaaacaggctagccaggagaattaccttcagcntgtatcacgagacaag

SEQ ID NO: 542 - DNA, 437 bp, Homo sapiens
ttttagtgtctattcttttattttactaaattaggaacgcagcatttacagaacaaataaacacaagtgacgtggccaccccaggatctaacagctcttcagtgagctatgttgcaagctcagaagtaatccactaacgaaccaagtcagactccagttcttcatcaaaaggtgctggtggaggttgtcagacgccttccaatatagatccccaatccgatggccagcaaatgagagagcagcagagatggaaggaaaactttcagaaattctgcagagaatatgccccctttcttcatgacgctcgtgttcctcatgcttagggtggccgtgcgcttccgggtgtttaaagaggaactcctttggggggaatatttttccggccgacttgaccaatcccatatccaatctgagtttttcttcaagatgctttcaac

SEQ ID NO: 543 - DNA, 444 bp, Homo sapiens
attgaaagaaggaaagaagttgaaagcatcttgaagaaaaactcagattggatatgggattggtcaagtcggccggaaaatattccccccaaggagttcctctttaaacacccgaagcgcacggccaccctaagcatgaggaacacgagcgtcatgaagaaagggggcatattctctgcagaatttctgaaagttttccttccatctctgctgctctctcatttgctggccatcggattggggatctatattggaaggcgtctgacaacctccaccagcaccttttgatgaagaactggagtctgacttggttcgttagtggattacttctgagcttgcaacatagctcactgaagagctgttagatcctggggtggccacgtcacttgtgtttatttgttctgtaaatgctgcgttcctaatttagtaaaataaaagaataga

SEQ ID NO: 544 - DNA, 376 bp, Homo sapiens
ttttttttttttttttccctttaaccaaggatttattttttgtttccagcattacaatttgcaataattcatagatttccattccagtaagttttaagacacagatctcacacaggcagttgggtccacatgttaagaactcattaattcagcaaagagatcacccagccgccattctcatatgaacaatgctcactgctacctgaacattttaaagtatgttatgagttgttttgatgatgacagctgcagcttttcaccacattttcaattactgaattgcatgttttttttccaccttgataacttagggtcagtagaaagctatttacttacatgttatagtcaatatactatactaaatgccatttgtaac

SEQ ID NO: 545 - DNA, 414 bp, Homo sapiens
tttgcctttttcaaaattatgaaatacaaaatgcagtcagacaagtacatgaaacggcaatgtctggcttaatgaatattacgaggcaaatatcctgtaaccaccatccagatcaagagaacattaccagcatcccagaagcctctccatatgacctttgggaagcagacatttccaaactggtgattgtatatctgtgggcgtgggaaaggtctttatttcatttttagaaatgggtctcaccattttgctgaggccgatatcaaattctatttctgcttccttacgcaattttttctctctggcaagagcttcagggcttccccaaacttccaaagattttgcttccacatctgatctcaagtatacagtaaaagactcagtatcttcatggggacttcgtcgtctgatttt

SEQ ID NO: 546 - DNA, 292 bp, Homo sapiens
  misc_feature (1)..(300): n is g, c, a or t
ngatttaaatcattatcttttattttttttaaagcaaatcagtgaaggaaaggacaaaaacctttggttcacttatgtatttatgaatggaaaaagtttataatgcaaatttcactcattaaaaaacttaggnacaaattacaacattacagataattctctttttgcttcttttgtttcacatgggagaccttgggagactcaattcacggttaggacacctaaggtacggaggtcctccgggggnaaatattacacaaatggggnggcctcttggaatttttaggnatat

SEQ ID NO: 547 - DNA, 326 bp, Homo sapiens
ctgatagtccaactccaccgccaccacctccaccagatgacattcccatgtttgatgactctccacctcccccaccaccaccaccagtggattatgaagatgaggaggctgcagtagttcagtataatgatccatatgcagatggggatcctgcttgggcccccaagaattatattgagaaagttgttgcaatatatgattatacaaaagacaaggatgatgagctgtcatttatggagggtgcaatcatttatgttataaagaagaatgatgatggctggtatggagggagtctgccattcgagtgactggtctgttcccgggga

SEQ ID NO: 548 - DNA, 422 bp, Homo sapiens
gaagaaaaagaacaaagataagaaaagaaaaagagaagaagatgaagaaacccagcttgatatgttggaatctggtggacagtaacaaactttggtgaaatttcaggaaccatagccattgaaatggatgagggaacctatatacatgcactcgataatggtctttttaccctgggagctccacacaaagaagttgatgagggccctagtcctccagagcagttttcggctgtcaaattatctgattccagaatcaccctgaaatctggctatggaaaatatcttggtataaattcagatgaacttgttgttgggcgttcagatgcaattggaccaagagaacaatgggaaccagtctttaaaattggggaaaatggctttgtcgacctcaaatagctgctttattaggatacagtgaagca

SEQ ID NO: 549 - DNA, 323 bp, Homo sapiens
  misc_feature (1)..(323): n is g, c, a or t
tnaaagcatttcctcntgaatattttattcagaaaaaaaaacacaaaaagataagacagaaacaaaaatcccagtcatctgcagtatctgtcggttttcaatttggttctcttttttaaataaagaaaaatagtaaaattaatctatgtaaaacatgccatatatattcaacgtgctacntaaatataaaaagctttaaaacctgtgtgttcnattttgngttattgtattaccacaacacttatnttaaaacatgtatacttttaaattgggtttccntaaaaaaatggattctantcttataaaacgttatttcctaanta

SEQ ID NO: 550 - DNA, 422 bp, Homo sapiens
  misc_feature (1)..(422): n is g, c, a or t
ttggttcngtgtttaccctttatttggaatacagtgcaacattacaagttttggatcattaaatgaatggacttggtgatatagtactaacaagcacgacctgaattctgggagtaagtggttttctagttcatgggggaggaaaacagatacgtgcaagatctccagagggaacagaaccatggtactcagtgagtcaccaaagggctttggcttcaactcactaatggctggaacaagtgccagtcttggtcagccatccaggnttttcatcacagcaaatcaaaatctccaatttttcaaactaattgtaggtaggaggagagagantaactcccaaactgtcttataaaaggntctaggatgactacttgaagtgtccccccattcatgagttgggcaaattcttcagagttnactgt

SEQ ID NO: 551 - DNA, 316 bp, Homo sapiens
  misc_feature (1)..(316): n is g, c, a or t
cnggggttacctngntntatttgaggagtaacggcccagcggaccacccaggcttgaggcagcggcgggaaccactcggtttgctgcgataccatggaaggaggcgggggaagcggcaacaaaaccacagggggattggccggctttttcggagccgcgngacaggtntactcgcacgcggatttggctggcgtcccgttaactggtatgaaccctctgtctccttattttaaatgtgggatccacgatacctcgtgcaggatacagatggagttttatttttaccttaccggagctaattaaaacccgggggcag

SEQ ID NO: 552 - DNA, 436 bp, Homo sapiens
aatctagtggttctttatttataacgtaggctgaagcaattgttacaatgtaggagggagacacattacacaattgttatttatacaagtttagaacaaaaaactgcacagggagaggtcaactctcagtacaaactagcaactaaagcacaataatttactgttagaaacgatttctttctttttagctgtgacactgcttttacaatatgcaaaaacacaagcagaactacccaaggtgtgttgtcacattctttctacattgaatttggcaacattttatttattcagattatactaacgtttaaaaactaaacaagtgaaaagctgtaccaaggtacagttacatccatttatttcaaaggtttaaaataccacttttatctattgtgattaccttgcagcgatttctgcttttgaaaaaccatctcaagca

SEQ ID NO: 553 - DNA, 443 bp, Homo sapiens
  misc_feature (1)..(443): n is a, g, c or t
cagttacaggtattttattgagcagagacagtgaagttccttatgctgttatttcaaaagtgtttcctggtttctttttaatgaatgtcttaaaatacaagcaatcaggaccctttaaataaggcagtatgttcacaaatcaaaatagctttctcgctcggcatcagttgattcaacatcaacatgcagtgtccagaatgaataagcagttctttaatggttatttaaatatattccagaagagcgtttataattcatttacaagtgcagtattgcgctagtaaatgttacttgacctcttgtataaataatgccgattaagaattagtcctgggaataagttttccgaatttcctaactcnggtaagatctaaaaccaccaattggnaatgggtataaangatggtaagaatccntaatggngataaaggccatccccaaaa

SEQ ID NO: 554 - DNA, 459 bp, Homo sapiens
agtggacgtgtcttttgaaactgctgctctttcacttctcaggcgtcaccgagagctcagcacccaggctgaactctgtaccatttggaagaatggaagctgatgcatctgttgacatgttttccaaagtcctggagcatcagctgcttcagactaccaaactggtggaagaacatttggattctgaaattcaaaaactggatcagatggatgaggatgaattggaacgccttaaagaaaagagactccaggcactaaggaaagctcaacagcagaaacaagaatggctttctaaaaggacatggggaatacagagaaatcccctagtgaaagagacttttttcaagaagtcaagggagagtgaaaaatgtggtttgccatttctacagagactccacattcaggtgtaaaatactagacagacatcttggcaatattgtccaagaaacacctcgagac

SEQ ID NO: 555 - DNA, 319 bp, Homo sapiens
ttaagccatccaagtaaaaaaaaaaattttaatttaacaatgaaaaaggaacttcaaagggtttatgccaaaaaacaaaccagtcctctgcagcctaactcatttgtttttgggctgcgaccattgtagagggcgatcaggcagtagatggtccctcccacagtcagcgccatggtggtccggtaaagcatttggtcaggcaggcctcgtttcaggtagacgggcacaccatcagctttctggaaaaacttttgtagctctggaactttgtttttcccagcataatcataccctgtgggaatcggaggtcagtttagtt

SEQ ID NO: 556 - DNA, 334 bp, Homo sapiens
  misc_feature (1)..(334): n is g, c, a or t
gcagcggatgtgnaagccggactctgggcgtcatgtactacaagtttagtggcttcacgcagaagttggcaggagcatgggcttcggaggcctatagcccgcagatntaaagcctgtggtttccacagaagcaccacctatcatatttgccacaccaactaaactgacctccgattccacagtgtatgattatgctgggaaaaacaaagttccagagctacaaaagtttttccagaaagctgatggtgtncccgtctacctgaaacgaggcctgccttgaccaaatgctttaccggaccaccatgggcgcttgactgtgggagggancatctta

SEQ ID NO: 557 - DNA, 439 bp, Homo sapiens
ttttatatatcattctctgaagagcatattttattaatcttcaagttcctcagcatattaataataaaaacttgatatatattatcaacaagtctgactgttatgcccaaagaaaatccagattattttaaggtgagtttgcttctttttcatctgattcatcatccataacctgttctacgccttctacctccggaatataaaactgcagcatgttctgaattccatttttcagagtaatgattgaactagggcagctggtacaagaaccctggagtttcagctgtacaatgccatcttcaaagcctttgtagattacatcccctccatcttcctgcacagttggccgtattctagtatctaacaattccttaatcattgccacaacttcatcatcttcttcagatcctgcttctcctgaaggtgtttcctcagtaac

SEQ ID NO: 558 - DNA, 353 bp, Homo sapiens
ctaactttttaataaaaaccttattttcttcggtttttgaaaaacataatggaaataaaacaggatattgacataatagcacaaaatgacactcttctaaaactaaatgggcacaagagaattttcctgggaaagttcacatcaaaaagagtgaatgtggtatatttctaaatgatatggaaaatagagacagatttgtcctttacagaaattactgagtgtgaataaaaacttcagatccaagaaatatataatgagagatataatttttgttaataagacaaaggtaatatattggatacaaagacacaaatgtattgtgtgttcaattattttgttggtcttgagattta

SEQ ID NO: 559 - DNA, 334 bp, Homo sapiens
cagttttggaattctttattactttgaacccaagagccactgataactggcacaatccaatgaaacagaggaagcagcagcttaaacaaaggaaaatacatttaagattataagtctgggggggcggttacaagcttaaaaagtgacccagacagggatatcattgctaaaaaaaaaaaaatccccttgtgacctgggtacattttgcaaagccacaggtttgcaatgttacacaagggccaaaggaggccatgagttgtctttggttgtggggacagagggtaactgttcatgaaaatagtgagtgtctgaagattaagaaaatcatgctgca

SEQ ID NO: 560 - DNA, 356 bp, Homo sapiens
tttttttttgcagaccataggaagtttattgtgtctttgagacactacaatgcagactcctcttccagagaaaggtctttcagagacagggaaccgtcatccggatgcgttgctcatttgtcattttcataggcagctggattcttcctcttggatctctcgaactcttcagtcccccatgtgtagataagataaaacactacaaactgcggcaccacgcgaaagaaagactcccgaatgcggcgcagaacattggggattcctttagtgaagacgtgcggataggcgcgctgctcgaacggtgacaagctgtagctgatcacatgccgcatccgcgtcagattcccaaactcgcg

SEQ ID NO: 561 - DNA, 350 bp, Homo sapiens
  misc_feature (1)..(350): n is g, c, a or t
acccaggacctgccaggcgtcaagtcaccgttgtgcgtggcaagtacgactgtggccacgtgcagaagaagtgacggctgggggcacagtgggctgggcgcccctgcagaacatgaaccttccgctcctggctgccacagggtcctccgatgctggcctttgcgcctctagaggcagccactcatggattcaagtcctgggctccgctcttccatcaggaccactattaagccataggagtcctggggggtgcaaagggtgcccctcttgttcaacacccttggcttctgttttttaaganggggttggctttaagggactttttcttncttggggacaagacaatttta

SEQ ID NO: 562 - DNA, 341 bp, Homo sapiens
  misc_feature (1)..(341): n is g, c, a or t
gtttttttacatcacaagcgccagggtctgtttattaaaaccccttcccagcagagggcagtacagtgtcttgtcccagcagaaaaggtccttcaggccacccctctaaacacaggagccaagggtgttgacagaggggcaccctttgcacccccagggactcctatggcttaatagtggtcctgatggaagaggcggacaggtacttgaatccatgagtggctgcctctagaggcgcaaaggccagcattcggaggaccctgtgggcagccagggagcngaaggttcatgtttcttgcaggggcgcccagccacttgttgcccccagccgtcaatttttt

SEQ ID NO: 563 - DNA, 463 bp, Homo sapiens
  misc_feature (1)..(464): n is g, c, a or t
agcaaagaggtggggcacatccactgcagtccaggcattctggcaccacctctgttattaactggaatcaaattttaaaaatttctgtgatcttgaaggtcttgttgaagttttagaggtcttttgtttttcttttagccactagatttttcaggaaaaattcacctgctttatatgaagaacgcaccaaagggccacttgcagtataatgaaatccaagttcatttcctactttttcccagtatttgaatttttcaggagtaatatattcttcaaccttaaggtgacgccttgttggctgcatatattgtcctaaagtcaagcagtctacatctgcctcacgaaggctnttcattgttgcatatacttgctcatcattctcgcctaaacccaacattatagatgttttagaaataacatcaggctgaaccttcttgggcatgtttcagtacacgtagggact

SEQ ID NO: 564 - DNA, 498 bp, Homo sapiens
  misc_feature (1)..(500): n is g, c, a or t
gtggatcgagatgatatgcctgatgggggagctgaacacattgcaaagaccgtatcatatttaaaggaaaggaatccaaaaatccttgtggagtgtcttactcctgattttcgaggtgatctcaaagcaatagaaaaagttgctctgtcaggattagatgtgtatgcacataatgtagaaacagtcccggaattacagagtaaggttccgtgatcctcgggccaattttgatcagtccctacgtgtactgaaacatgccaagaaggttcagcctgatgttatttctaaaacatctataatgttgggtttaggcgagaatgatgagcaagtatatgcaacaatgaaagcacttccgtgaggcagatgtagactgcttgactttaggacaatatatgcagccaacaaggcgtcaccttaaggttgaagaanatattacncctgaaaaatttcaaatactggggaaaaagtaggaaatgaacttggatttcattatctgca

SEQ ID NO: 565 - DNA, 386 bp, Homo sapiens
  misc_feature (1)..(400): n is g, c, a or t
ttttcttttcaataatgtctgacatttattgaaaataaggaaaagactttctccaggtagtgtattagagcagagcagaatgcaggggttactgtgttgaacaaaaggcacacatcagagagacagttgcaaactcagaatactgcgttatgggcaaaactaactggtccacaagagaaaatgagagactcgatttggctgccaggaacacctgggcctaggcaagaacacaaganggtttctgggggtggggaggaaataggtctcgctgaaggtgacagatcccttggggggcggccagctgtctggatcactgtccagggactgtggccagcccagatacctccgaggttgagtccagattcacttaggancagcagtctgtc

SEQ ID NO: 566 - DNA, 426 bp, Homo sapiens
ctccccaccagactgccagacgactacatcattctgcccacagacctgcgctgccacagccatcgccatccatcgcatcccaccgacagactgctgctcctagtgatctggactcacctcggaggtatctgggctggccacagtccctggacagtgatccagacagctggccgccccccaagggatctgtcaccttcagcgagacctatttcctccccacccccagaaacctcttgtgttcttgcctaggcccaggtgttcctggcaagccaaatcgagtctctcattttctcttgtggaccagttagttttgcccataacgcagtattctgagtttgcaactgtctctctgatgtgtgccttttgttcaacacagtaacccctgcattctgctctgctctaatacactacctggaagaaagtctt

SEQ ID NO: 567 - DNA, 473 bp, Homo sapiens
ttttaagaagacaccatgaagctgaatatctgtttacaaaccaaccaaccaacccaaccaaacacatttctgagctgacaaaagatcttacgggagaagaaatgggcattcccatggggctcacagtccatttcctacctgatgaaggagggaactgttcatcagtccttgtgcccctgggatggtgcctgtgtgtttcatgtggacattgttcatggctggcactttggcaacctttgtgggtttgctgctgctgttgttgatgctgctcgagctgggtgagcactttcttttctttcctatgagtttgtctagaggagtgtgtgagtgggaaaaactgccgtgggagttgacaggcagttcattggactggtgaatgaatggcccaagagaaagagtagaatcactgctgttcaccatcacactcatcctcttgatggattcagcagggctcccggtggggggggcccctc

SEQ ID NO: 568 - DNA, 290 bp, Homo sapiens
  misc_feature (1)..(300): n is g, c, a or t
atacttttgaattttaaaagaatactgtactggaatgggttaacatcatcatctttagcatcctgggagcattattcagtagttaataaacagacattaaaacctctgcctggctggtttttgaaaaaggaacctgagggaccccaaactcagccactcttgtagtttccatctccggttcttttaatcctgggccaagatggcggccttgggagactttcttccggtcatagggccagaccngagggcggcccatgcaatcaatgaaggaatgtgggtgangttgatgt

SEQ ID NO: 569 - DNA, 315 bp, Homo sapiens
  misc_feature (1)..(333): n is g, c, a or t
aaaagatgatatatatgaccccacctacaaggataaggaaggcccaagccccaaggttgaatatgtctggagaaacatcatccttatgtctctgctacacttgggagccctgtatgggatcactttgattcctacctgcaagttctacacctgggctttggggggtattctactattttgtcagtgcccggggcattaacagcaggagcttcatcgtctgtgggagccaccgctctttacaaaggttcggcttncccctacggcttcttttctggattcatttgccaacacaatgggcatttccaggantggatg

SEQ ID NO: 570 - DNA, 858 bp, Homo sapiens
ttactgcaaatgactttaatcattaaatagcttctatgccacactctgattaagccgactgaggtccctgggatctgggtcactggaccgagctgctcgctcgtaggctccactgccaggtccgggcgcgctccccacagcgctcagttctggcccagacagggctcgacatccgccgcctgcagtcccggggtggccgtcaccgttccacggccagcgcctctgcctgctcgtccgggaaggcgatgtcgaagatctcccggtagtgttccacgaagtgcacctccaggccctcggtgatgaaggctgccaggtcgtagaagtccttcttgttctcggctggcaggacgatgcacgtcaaccctgcggcgcttggccgaaatggtcttctccttgatgccaccaacaggcaggatcttgcccgtgaggagacttcgccagtcatggccagattctgccggacaggctgcccatggccagggacagcagggccgtgacgatggtgcagcctgcgcttgggccgtccttgggggtggcgccctcgggacatgcaggtggatgtgtgaggtcacaggtagtcattggcgggggcgtgctgcatgaggaaaggtctggcgaaggtgtaggctatacggcgctctccttcatcagctgccccagctggcctgttaactccagggttggcatccttgttacccttggaatcctggcctgtggccgttcaaggaatttctcacaaacagctttgaacctccaattggggtcaaggcaagcccatgaacaagccgggggtggttaaggtaaacatagggttcaaggtgtaaacagggtttcccaagaatcttgaaggttctgggg

SEQ ID NO: 571 - DNA, 394 bp, Homo sapiens
ttttttttttttggagggtgggcagcactcgctttattgtccagcattccacatggatagacgcaggacagcaggccagggtggtgggctaagaggcagcctgccgtgccatgatgctgctgggcaaaccgctgcatccgctcctcgagctccggccgaaagtggcggatcagaccctgcacaggccaggcggccacgtcacccagagcacaaatcgtatggccttctatctgcttgctgatctcccacagggagtcgatctcggccggccgggcatcccccctcacgaaacgtgccatcaccttgttcatccagtccacaccgagcggtccatgacgatcaccgcagctgtgcccaggcctgtctgtgcctgcaccagcgcatcgaagtccat

SEQ ID NO: 572 - DNA, 431 bp, Homo sapiens
atccgaggggaattctacaatgaggcctccaatctgcaggtggcaccgagagcctatgagcaggtctgattggcaagaatgcttgtggctgccccacaactgtggccaacgtggagacagtggcagtgtcccccacaatctgccgccgtggaggtacctggtttgctggctttggcagagaacgcaactcaggcaccaaactattctacatctctggccatgtcaaccacccttgcactgtggaggaggagatgtctgtgcccttgaaagaactgattgagaagcatgctgggggtgtcacgggcggctgggacaacctccttgctgtgatccctggcggctcgtctaccccactgatccccaagtctgtgtgtgagacggtgctgatggacttcgatgcgctggtgcaggcacagacaggcctgggcaca

SEQ ID NO: 573 - DNA, 290 bp, Homo sapiens
tttgtaattagcacttaattttaattaaaatcaacagttcaggagaagataagatagtgtttaatatcaatttctgagaaatcacatttatataaaagaaataaaacaggccagcagaagtccaaaaaagattcagcttacattattgcacttggatgaaatatgctatttagagtagcataatattcaggccaggccaggaggagaaagagaaaaatggagaggacaaacctccaggtagtatttattccggattccaaactctcctgcggcctaaacagtatttagtc

SEQ ID NO: 574 - DNA, 428 bp, Homo sapiens
  misc_feature (1)..(444): n is g, c, a or t
ttttnaanaagacagaaagctgtaattctttttaatgtttaacttttctttgtaaaaaacttattaaaaaacttaaatggtcagttaaagttaaaaatctattgctgcacaatttaactgattaaaagatttccagatctcttgactccaagagtcatttctttcatttcttacagatctcacacttccagatttctctttagcaaacatgatctgaaatcatttgtaggtaatcagcacttcaagcatatggaggctctggctgaggcagcagagtcctggggagactgaacactggggagattcaatgtcccccacagaaacctaggcctggggctcagccacccacttgctaggggggtccctgcacagggcccnttgcgggctnctgcacggggatctatgtgggccgaaccntgagctcgatc

SEQ ID NO: 575 - DNA, 493 bp, Homo sapiens
  misc_feature (1)..(500): n is g, c, a or t
ggcacgagcttgtacctgatgccgatattcaacgctttcggaatnagtttgaaaaaatctgcagaaaggaggtgaaccattaggattaacagtaatgagagatgtgaccatttcgaaatccgaatatgctccaagtgagaagatgatcacgaaggtccaggatttccaggaagataaggagctcttcagatactgcactctccccgagattctgaaatatgtggagttcttcactggacctaatattatggccatgcacacaatgttgataancaaacctccagattctggcaagangacgntcccgtnaccccctgnaccaggacctgnactatttccccttnaggcccagcgatctcatngtttgcgcntggacggcgatgggagcacatcagcnggaacaacggctgtctggttgtgctcccaggcaaacacaagggctccctgaagccccacgattaccccaagttggaggggggganttaacaaaatt

SEQ ID NO: 576 - DNA, 413 bp, Homo sapiens
ccgagcaggaatatccactttatttggactccatgacaccgttcctatgcccttgactagatgtgaatgtattatacattgttctagatttgggggaaaaaaatctcttatgacataaaattggtagggaatgggtttatcagaaaggggatacaaaacataccctaagctccaaatcattcacttcttcttgggtaaagagctaactgaatgaaagaaattgatttaacacttaaattagacaccaaccacctttattggctgccaccctaaattagttttccttaaaacagtaatatttcacttttactgtttttttttccattaaagcaacaccattgtgctgcaaaactaactctatgcaattaagtacctggatacatgttttctggcttttaacaagtgatagaaaa

SEQ ID NO: 577 - DNA, 350 bp, Homo sapiens
caagacagagatgtcggaggtgctcacggagatcctccgggtggacccggcctttgacaaggaccggtttctgaaacagtgcgagaacgacatcatccccaatgtcctggaggtgggtgccacacccccaggacccctcccaggcggcaggtcctggctccaccacctcccccgccgcagccggcaccctgggtgtcgccagggaactctgctgccgaggctgttttctgaggaggctggttgcacacgggctcctgccgactagcagctgccccatgagctgtgcccgaagcccttcctgggccttaccggcacctccggtacctccaggtctgtttccctcactcctc

SEQ ID NO: 578 - DNA, 425 bp, Homo sapiens
tgtttttttgtttgggtgagtttatttacatctaaggccttataaaggcgtaaaaagtctcattttatggcacatttaacaaaatgtattgattaaagctggaattgtcccagaaaactcaggatccctagtcacactgggctctctgttcagcagtcctgtagggtgggtcagtcagaacccaaagcttcagcttgcctcagaagcatccaagctcagtccatctgaaccgcatctagttcatccaagaagcgccggcacttccccatcagtactttgatggcttcactcaccagcacatctggtgggcacaccccggttgactcaacagagaagatataatgatctcgaacccgggcaagcctcacaaccttctttagcttctcattccggaagatttctctgctgaaggtatccagacgggg

SEQ ID NO: 579 - DNA, 321 bp, Homo sapiens
tttttgacagtcataaatgcataaagttactttatttttaagtatacatataattttgaaaaatataaatgctaaaatatctcatcttcttcatctcttaattccataaaagtcacaatagaaagcttcataaaactgtaaaatactatgttataggaattttaggatttatattggaaaaagttattagtaatatattgaaatgttttctgttctttatctttttttgttccaccatgttgatctacttcatttaaaataaaaagatgcatcatttctctctccaaagtttaataaagacttaagagaataaaaataaga

SEQ ID NO: 580 - DNA, 483 bp, Homo sapiens
  misc_feature (1)..(500): n is g, c, a or t
gtgtggccccagcccgaacagcattgcaccagtgccgtctgtgcccacgtgtgcagactgtggctgcagagaccttgcgaccatgtgtagattgcatggaccccgacaaagggaaggctgctgtgtagctctgtccactctgaataccaagtgtgttgggaattgcatgccatctccaccctgagcctgacctttctgagtgacatgggtgtgccagggtagactagggaggttccggtgtctgggaaaagcactttacagatgagattccctctcctcccccaccttcaagcaccctgttccctctttctttcttttgtgttgggattgtttaaaaaccaaataagcattgtgttaacctncacagtaggcatttcttaatttgtttgggncaatggttacaacttaggaagnttttccccttttcggggggggttttgcaagggaagntttaggccnttaanttgggtcaagggcccggcc

SEQ ID NO: 581 - DNA, 461 bp, Homo sapiens
  misc_feature (1)..(461): n is g, c, a or t
tccaccagaggttttttatttcagccactcaggaccctggctttctgctccaaggcactgaacacagtcaggctcttctaaacactggcagggacctcccccacagccacccccacagggttctctgtttcccaagtcctgatggattcaggcaagaccttcacacattcacccactacctgctggagaggagggtcatgaggcagcctgtgggtgcccagctcagtgtgacacactgccaatgtgccgcctcccccagcctctgatggggccgggccttgaccacgtgacaggctcaagctgccgtgcacatcccccgggaaaggggaaggagctgctaagggtgtaggcagtgaccaaacaaataaggaaatgcttactgtgggagggttacacaggtggtttattttgggttttttaaaacaaattnccaacacaaaaggaagggaagggggggacag

SEQ ID NO: 582 - DNA, 496 bp, Homo sapiens
  misc_feature (1)..(500): n is g, c, a or t
ggcatttttaatttgtttgttttatttaagtttaatgttaattccatgctgngtttcagtaagaacaatacagattctgtatctgtggctccagtcagatatccagtagtacaaattagcttcaagttacacatactgaacaaaagaggttgagcgagcgaaggaggggaggagggggtggtcagagatggtttctcttgttggcttatgtctcactgattttcgtcttccacgtcctgcagcgcttctttattctgctcttcaccgtcaccctgcatgtctgaagtccatagtgtcagattatcacgtaacaactgcatgataagttgtagagtccttatagctttcttcactcagcgtatccagttctgcaattgcatcatcaaaagctgcttttgccaacctgcaggcacggtcaggggaattaagaatttcgtagtagaatacggaaaaattgagagcaagacctaagcgaataggatgcgttggtggaagt

SEQ ID NO: 583 - DNA, 504 bp, Homo sapiens
gaatatcggcaaatggttgagactgagctaaagttaatctgttgtgacattctggatgtactggacaaacacctcattccagcagctaacactggcgagtccaaggttttctattataaaatgaaaggggactaccacaggtatctggcagaatttgccacaggaaacgacaggaaggaggctgcggagaacagcctagtggcttataaagctgctagtgatattgcaatgacagaacttccaccaacgcatcctattcgcttaggtcttgctctcaatttttccgtattctactacgaaattcttaattcccctgaccgtgcctgcaggttggcaaaagcagcttttgatgatgcaattgcagaactggatacgctggagtggaagaaagctataaggactctacacttatcatgcagttgttacgtggataactgacactatggacttccagacatgccagggtgacggtgaaagagcagattaagaacgctgcaggacgtg

SEQ ID NO: 584 - DNA, 518 bp, Homo sapiens
  misc_feature (1)..(518): n is g, c, a or t
ttttttttttttntttttttcacccagtnttctctgtttattcttctcaactacaccatgntgctttgcagnttggtttnacaaacatttccccacaattaggatgcatgatgaccaagggaggaaagaaaattttcacagggtatttaaaaagtctcagggaacaaacagntcagtgncaaatcagtaaggctaacacctgaaaatgactctgcacaggtgaggaagtggagcagaagagggaggggctggttcagggaacaggatttaatatgtcagtgaagaccctgcctctctctgtaacaagatgcctaaagaagantagtggtgcttccagcccagctccctcttnttttgggaacaacagtcatttctcagaaacctcacttncaaaggcagcccttncaaaaacatgagagntttagtttggagaaattttttaagctcacttttgctggagaggaatgantttaaactngggcacacagngagcancaaanagttttnaagagccacct

SEQ ID NO: 585 - DNA, 537 bp, Homo sapiens
  misc_feature (1)..(537): n is g, c, a or t
tcaataaatatgttaaaatttgttatcccctgttgtggacattttttttagataatctaagnctagaaaaatgacattgaattctggnacctggctggaaggaaaagaagccctttcttgtcgctggcagctgtgtggtagggaggtccaagtatgtgcatatgagataagcctgcaacctcttgaccttcagctcctatgcaggcttctcttgagtcccagagacaagggcagcttgggtctagtggagatagncactgtgcttgggagttcaggggacctaggnacaaatcccagccagttagttattcactgtgctcctgtttcctcagctgaaaaaggaagttggttatgccaccttcttngccttaatggcattaaatgaaatttataggaagaaggtttttgctcagtacctggcatgcaacagacattggataaatgttagttggatccagatatacacagaaagatatctgcttcctgccagggttgataactgttgaatngacacttgtccatagtcttgaaagccag

SEQ ID NO: 586 - DNA, 295 bp, Homo sapiens
ggtaatgaaaccgtgaactttattgagaactttcaagcatcataacttgaagaagtatttctcaattcagtttatcgaaatacttcagctttccagctggatctgggattattgtttcactaccaggtttccagccagcagggcagacttctccgtgtttgtcagtgtactggaatgcttgaaccaaacgtagtgtctcatccactgatctacccacaggaagatcattcagagtaatttgtcttaggattcctttgtcatcaataatgaagagacctctaagagtgtggcctga

SEQ ID NO: 587 - DNA, 365 bp, Homo sapiens
  misc_feature (1)..(400): n is g, c, a or t
ttataacaaatttactgnacatgaatttgactttcacataaataattataaangcaggcaccactgagagttgttgttcttcattccttgacatttttttatgagcattcacanatcaaatgaaacactccnaatgcccttccacgccccaaggcattccagttcacctggctgaagtcaaatccagtaaatgaggactgtgagcaggttgttcacatccccaggcctcagctgcctcatctataaatgaaggcgttaaccacaggactttggatctccctatgaggggctcacctttaaggantcaaaatacagttccagggaattaacagagaaaaaagttcctctaggaaattnggaaaaaa

SEQ ID NO: 588 - DNA, 435 bp, Homo sapiens
  misc_feature (1)..(444): n is g, c, a or t
cagnttgggnaacagggcgagaccttgtttaaaaaaaaaattcaatattggggttggaacatttcagttgccattgacagaacacccaattcaaattgactgaagcaaagaagggaatttattgcctctttcacattgaaacccaggagtggataacactggcttcaggcaaagcttgaatcaggactcaatctacaggccagcacctttctcttggccggatgtcctcagggctggcagatgcagtagactgcagtggacagtccccaccttgttactgctactacactttgctcctctggcccaaggcatgaggagagaggctgtgtcagaaactggaagctgttctcaggatcactgggctctttcttgggcagagggggatgtctgggttggctggaaggggagtgggtttgttaaggaacgcntggatgg

SEQ ID NO: 589 - DNA, 375 bp, Homo sapiens
ttttgtgggaaagctgtttactgcgttctcccgctgtgtgtaattgggttcagtgtggctgaaacacagctttgccccaggctttggcacttccagccccaggagaggcgctgaaccccagcaaaggaatgtgttccctgtgggcagccggtgcccctggtcactgcagttgcccaaagctgatatttccctgggatccagctggagatgttgagctgggaagccctgttggtcacgcctaactccggaggcagtaagaaggtaaaagttccaagtttctccgggcctttaagcagggttaggtccaacagggttaagcatcccgggacttaagcctgagggggcccaggagttcaaagggagagttcaaggttc

SEQ ID NO: 590 - DNA, 461 bp, Homo sapiens
gggtttcaaagggagcgcacttccgctgccctttctttcgccagccttacgggccgaaccctcgtgtgaagggtgcagtacctaagccggacgaggtagaggcggcgcaccccttctgacctcagtgccgcgctcaagatcagaatgccagaacttgaaggacttgcgggacggtgcccgggcccggggatgggcacgcctgaagctgttgtgggggcgcgcgtggctacggtgtgcgcgaatctgtgttcaccgtggaaggcgggcacagagccatcttcttcaatcggatcggtggagtgcagcaggacactatcctggccgaggcgttcacttcaggatcccttggttccagtaccccattatctatgacattcgggccagacctcgaaaaatctcctcccctacaggctccaaagacctacagatggtgaatatctccctgcgagtgttgtctcgac

SEQ ID NO: 591 - DNA, 518 bp, Homo sapiens
tcaggttaagtaataaaaatttattgagaattcctgggttggtgtttatctcctcccagccttgagggagggaacaacactgtaggaaatcactgagaaatcacgcactgtccccaacagccccagttaacacagggaggaggaaagtaattccccagaaaaggggctagtcttcagtcttccttaatccaagaggggttcagggaacgactgtgggggaccatcgcatgatactggggcggggtagggctgtgctggacccctggctggctcctcaaaaactggagaagcagatccacttcctctgggggtggagttcttggtgactaggctcatttcttacccttgatgaggctgtcacttcccctggtgaaactttcatcctgtaggttcagcacaaggttgtcagctgtgagatagatacgattctgtgatgtggcgatcgtcttggagatattctgggctgctcgaatcttgcgaagtttgatgtagccagggttcttgcccagtgcttctcc

SEQ ID NO: 592 - DNA, 505 bp, Homo sapiens
cactgtttcaatctgattttattgaaaaggaaacatacaaaaatcatgtacaaaaaaaattaaccaaacatgtacagaaaattcattccggtatctacagcagcgcatatacagtatcttacaggctgggccatccctccccactcccagactcctccctcttccgagatttccccccctccctgactccccgtcttccccccagcgcttggccctggggactaaggctggggcggcttcagccaaaatctcccaccccccaaatgaatgccagtggtcacacgtgctctctctaaacctatgcaatgggattgatggggcggggggcggtcacgggcagagcacaggattcacagtctgggcccctcctggccaccccctgatgaaggtgaggcaggcatgcccaccacccgccggctggctcagggaagatggctgggcgccgggctggagcaaccggcaaacgagccccactctctggctccaggaggctagtggtcacgtt

SEQ ID NO: 593 - DNA, 338 bp, Homo sapiens
tttgcacagacgcgggctttattaacatttggtagtgagcacggcccccagcgatcgcggggctcgggtcccggtgacgcaacggttaaacctggctcgcgacttagcgcaggcgcctgggggaaagcccggagcctgaggcgtggccacggagccacttccggcggctgtgggcggaaaacccaaaacttccgatgggaccaagccttccgtggcttcacacgcaccggaaggaatctgggtcagccctccctccaaaggagacagcacggatcctctttttgcataggcctgagggaagtacttccgcccatattcaagatggctgcccagggcat

SEQ ID NO: 594 - DNA, 442 bp, Homo sapiens
gcacagcgctatggccgcgagctccggagatgagtgacgagtttgtggactcctttaagaagggacttcctcgcccgaagagcgcgggcacagcaacgcagatgcggcaaagctccagctggacgcgagttcccagtcctggtgggatcggaacttgggcaggggaagctccgccccctcccagtgaccttcgctccacatcccgaaactccacccgttcccactgccctgggagccatcttgaatatgggcggaagtacttccctcaggcctatgcaaaaagaggatccgtgctgtctcctttggagggagggctgacccagattcccttccggtgcgtgtgaagccacggaaggcttggtcccatcggaagttttgggttttccgcccacagccgccggaagtggctccgtggccccgcctcaggctccgggctttcccc

SEQ ID NO: 595 - DNA, 480 bp, Homo sapiens
tttttttttttttttttttttagagaaaaatacatacaatttattcattacatggggacaaaatttccataactctggaaggtcaagttacatcatcaaagttgtttatttaaaagtagaagtatgtgttggcaatcgtttccatatcagtcagaaaaattaggccggtttcacaatatggagtgtcctttctggtcaacagtattgcttcaggagagatagcatttcacagatctttcctgtaacttctagaaaagtcatccagccagatttaggttcaaacttctttacaaagccattttcctctttcttgttggccactgactctaccagcataggcgtgtgattgtgccatttcccccagcctccgttttgccttatccagtctcctgtgttattcattatgaactccgccacaaaattttgaatatccctataggtatccacatccggggcaattttgcgtcgtagaaatttctt

SEQ ID NO: 596 - DNA, 470 bp, Homo sapiens
acagcttcaaggtgagccagctcaagactttgctctccaccaggcagaagatgacagactgtgaatttggatatatttacaggctggctcaggactatctgcagtacgtcctacagataccacaacctggatcaggtccaagcaaaacgtccagagtgctacaaaaggttgcgttctcagtccaaaaagaagtggaaaagaatctgaagtcatgcttggacaatgttaatgttgtgtccgtagacactgccagaacactattcaaccaagtgatggaaaaggagtttgaagacggcatcattaactggggaagaattgtaaccatatttgcatttgaaggtattctcatcaagaaacttctacgacagcaaattgccccggatgtggatacctataaggatatttcatattttgttgcggagttcataatgaataacacaggagaatggataaggcaaaacggaggctgg

SEQ ID NO: 597 - DNA, 226 bp, Homo sapiens
  misc_feature (1)..(226): n is g, c, a or t
gagaattatttatgaggttgatgacccaagnctccccaatgatgaaggcatcacggctcttcacaatgctgtgtgtgcaggccacacagaaatcgttaagttcctggtacagtttggtgtaaatgtaaatgctgctgatagtgatggatggactccattacattgtgctgcctcatgtaacancgtncaagtgtgtaagtttttggtagantcaggagccgctgtg

SEQ ID NO: 598 - DNA, 342 bp, Homo sapiens
  misc_feature (1)..(342): n is g, c, a or t
agcatcaaaaagtttattacaactgtttttaaagtcagctatgatcttgacaaatattacgggtaagtctgtagcaagtttctaatttctgagatacaaaagacaataaatacagattaaaattcagcctacaaaaaagattctacatctaattactggtaccgtagncttagtttcaatatttcaaacatatgtataattcttaagatgctacaaaaactcatataatanngttattgttcactgacaaccaactaacagttcttcactgacaatatacaagtgtgcagtgccttcgagccttcgggtgaggccccccaggccctgcgggtgccggggaca

SEQ ID NO: 599 - DNA, 421 bp, Homo sapiens
aatgtatttaagaccaccgccttacaatttccagagagaaaatacaaaacaagaaacagacttggtttcaaatacataacaagtgtgctggagtttaaagcattactaataacattgttataataagaatgacagcttactccagggtacttcagcattcctgaggaataaacatgatttctcttttcctcccactgcgatgttgtcaggtggtcactgctcctgtcctttgacatgttttccatgtagaagacatggaacctggaaatcatgctgactgctggaataagccattcctaatgccatgccagaaccaaaggctaatggccacattctttttttaaagaaggtaagtgagaaaacaatccctaatccaaaaccggtacttatctaccacatccagcaggcactggtcccactt

SEQ ID NO: 600 - DNA, 299 bp, Homo sapiens
aaaaaaaacaaagcttttgatcattcccttgtcaacataattggcagatctactctcaaacacacttaagagtattccacacaacatgttcggaattcagatttattgatttccatcgtattgactttaaaaatggtatgaagctgactgcaagaaagggaactggtaattttaagttaaaattaagctaatggtgaaagtacatcacctctggcttcagtcaccacatcacctcagattgaatatagattttttatgaacaaagttccagaactctgaaatccagggatgctgcaggc

SEQ ID NO: 601 - DNA, 461 bp, Homo sapiens
tttttttgggggaaaatgttggttttatagatttattttcaaagagtaaaacacatacaatttaaatacaagtccatcagaatcactctgtcagagtcagcaagaatgccaaaatgtgtcctcactgccagacattcgtcactatcatctgagtcctctctcagcaaagccaaagggtctgatactttattcatatacatccttcttatctgcaatgtaatctacaatttcttgtggacacattaacttttcagcatctatatcaggaatttcaaacccaaattcgtcttccatggccatgataatctccacttggtccaaactgtctaagcccaggtctttcataaaatgagaatttactgaaagcttctctgggtcaatcttgtcatagagtttcaatacgtaaagaacacggtcctggatgccctctaacgtcaaaggaggcatgtcgctatactggc

SEQ ID NO: 602 - DNA, 466 bp, Homo sapiens
gcatgggtctcggccttcagcctatgtcagccgctgcccgccgctttgcgccgtgccccgggtccggatgctggccgtggccggcctctcagcaccgctctctgctccgaggggacccagacgaggctcgggactttgcagccggccttagtgctcgcgacaggttccgtggtaggagttacacatgttgtgccgccagtatagcgacatgcctcctttgacgttagagggcatccaggaccgtgttctttacgtattgaaactctatgacaagattgacccagagaagctttcagtaaattctcattttatgaaagacctgggcttagacagtttggaccaagtggagattatcatggccatggaagacgaatttgggtttgaaattcctgatatagatgctgaaaagttaatgtgtccacaagaaattgtagattacattgcagataagaaggatgtatatgaa

SEQ ID NO: 603 - DNA, 317 bp, Homo sapiens
taattctgatatttaactgtcataattctgtagtgctattatagtgaaaaactcagttctataagctagctgtgttgtcacagttttatcatagttcataattatttcatgtgcaatcctatttggaggccctgttagacttttaacaatcccatccatatctgtaattctctgatggcaagaatggatggagcatttctgagttaacagtgctggacagtatcgtactgggtgtcataaactctttatgaatggtaatattatgtaaattgaaatctggccctcaaactatattgcagctttcagcagtatgtttg

SEQ ID NO: 604 - DNA, 487 bp, Homo sapiens
tttttttttaagggatatataaatacatttattggtggtattcctgaatgatgaatgcagagaacagaatacaaagaaatcagcacataaaaggaaccattaatctttaaaaatgctatatacttacattttgaccaattttgcatatttgtttagatttacaaacaaatgtaaagctaattccaaagttttcttctgaatatacttcaaatttgaattgtagtgttctccattccaaagccagctgttttttgctggatttacaccaactatgatttactttgtttgtatctaacctaaaagcaagactctgcaagctgatcctgaagcagccagttactcaggaattttacaacagctattaaagagaggataaagccacatgaaagagcaagcctcaatactagatacatagatacaagagaaaataccaagaagcaaaaagaatcacagaaataccaattctattctaaagcataatttctaa

SEQ ID NO: 605 - DNA, 390 bp, Homo sapiens
tccaaggtcatggcaaaacatctgaagttcatcgccaggactgtgatggtacaggaagggaacgtggaaagcgcatacaggaccctaaacagaatcctcactatggatgggctcattgaggacattaagcatcggcggtattatgagaagccatgccgccgcgacagagggaaagctatgaaaggtgccggcggatctacaacatggaaatggctcgcaagatcaacttcttgatgcgaaagaatcgggcagatccgtggcagggctgctgaggcctgtgggtgggacaccagtgcgaaaccctcatccagttttctctccatctcttttctttgtacaatcccatttcctattaccattctctgcaataaactcaaatcacatgtctgc

SEQ ID NO: 606 - DNA, 366 bp, Homo sapiens
tgcagacatgtgatttgagtttattgcagagaatggtaataggaaatgggattgtacaaagaaaagagatggagagaaaactggatgagggtttcgcactgggtgtcccacccacaggcctcagcagccctgccacggatctgcccgattctttcgcatcaagaagttgatcttgcgagccatttccatgttgtagatccgccggcacctttcatagctttccctctgtcgccggcggcatggcttctcataataccgccgatgcttaatgtcctcaatgagcccatccatagtgaggattctgtttagggtcctgtatgcgctttccacgttcccttcctgtaccatcacagtcctggcgatgaa

SEQ ID NO: 607 - DNA, 365 bp, Homo sapiens
tttaggtactcaatcaacatttattggaagaacaatgaattaccagaagctatcttctgccctctcagggatttgcaggaagcacccaacagcccctgcattactgagatctggggtgccaccaatggctttgggcataatgcacctcctccataaggtccctacctgattcagcgagtttgtatacagcctcactggcctgctccacagcgttgggcatgtaggggaccagcgatccctggggcaaacgggcagtcaggtaggccaagcattcctccaggggtccttcttcctctgagtctagagtcagcttcacctgatagtagttgctgccccagtcagggtaggaacccaggccaagccta

SEQ ID NO: 608 - DNA, 454 bp, Homo sapiens
  misc_feature (1)..(500): n is g, c, a or t
ttttaaggcagttctcttctctgctaggcattaaactttaaaacatttgaatcattggaccataatgcttcaccctaacgatatttatataaaaggaagagaaagacattttcttttttttttttgagacgganttcactcgttgcccaggctnggagtgcaatggcgcaatctcggctcaccgcagcctccacctcctgggttcaagtgattctcctgcctcagccttccaagtagctgggattgcaggcatgcgccgccactgcctangctaaatttttttttgcatttttagtagagacggggcttctccatgttggtcaggctggtctccgaactcccgacctcaggtgatccgcccaccttggactcccaaagtgctgggattacaggtgtgagtaaccacgcctggctgagaaagccattttcaatacagagtgtaaaattaagatag

SEQ ID NO: 609 - DNA, 573 bp, Homo sapiens
  misc_feature (1)..(600): n is g, c, a or t
cttacccgcagttttcagatctaggatttgaagtgaaatgctttaatgatcttaaagcagaagaactactgctcaaaattcatgaggtgtcaactgttagccacgcagatgccgattgctttgtgtgtgtcttcctgagccatggcgaaggcaatcacatttatgcatatgatgctaaaatccgaaattcagacattaactggcttgttcaaaggagacaagtgtcacagcctggttggaaaacccaagatatttatcattcaggcatgtcggggaaaccagcacgatgtncacgtcattcctttggatgtagtagataatcagacagagaagttggacaccaacataactgaggtggatgcagcctccgtttacacgctgcctgctggagctgacttcctcatgtgttactctgttggcagaaggatattattctcaccggggaaactgtgaaacggctcatggnacattcaaganttggtgtgagatggttgggaaaatatggctcctccttagagttcacagactcctcacactgggtgaacaaggaagtttctccagcgccgagtggaa

SEQ ID NO: 610 - DNA, 445 bp, Homo sapiens
  misc_feature (1)..(445): n is g, c, a or t
ttggcttaaaaatagctgctaatctgtcaacctgtcttgggcagaaacagcggcggcgaccacanaggggagcgtcatggccgtgngctgtctgcgngcgaatccgctttcggactgaggcccagcgcagctntgcaaagagcagctacctggcaactgaacccatcatcaccacagccactcctgcagctgccacggtttctgccacctctaagatgtgccctgggtaactggctttgggcttctatgacttttatggcccgcttctcccggagtagctcaaggtctcctgttcgaantcgaggggaccngggagggagatgccaaccgtttcaacatcctttcctcattgtcttngggttgggagcggctantttacacagggcaaggacagcttttaaccttgccgacgaggttttggccagggttttntttttgggggacc

SEQ ID NO: 611 - DNA, 358 bp, Homo sapiens
aaggggggtatttgtttaatacctctctctctcccatttttgttttatacaagttgcatttctagccaccacatcattggcatcttattccagaagaatagcattagttctagcacttgccaggcgggtgcatgcgcaagagtccgtacgcccacctgctgcggtagttctcccgcctggcctctccatcaaggtggagactgccctcatggttttccagctcgtagagacgaacaggtcccggctcttggtcagccgaaccatgagccggcccacatagaagccactgatttggcccacaccgtcatttctccccatggacaggaggaacgtcagtgcacccggcttgtaggctggg

SEQ ID NO: 612 - DNA, 445 bp, Homo sapiens
ttttttttattttttttttttaagagcaaagatattcagtatttttatttctgcctctgggaaacacactgacattttaaaacacatgtaagtcactcatagtacctcataataacatttgagcaagacttagtcgttcattcatttattaagtggggtttcatgatgttgcataggctggcatggaattccagggctcaagtgatcctctcacctcagcttccagagtagctgggaccacatgcccatcccaccatgtccagcttcttcatttatttttgtgtctctacatggctactttttaaatacaacattaattttatttaaaaaatgaaggaaagaagtgtttttcctattatccagtggagcataattgtgagaagagagataacaaaaataaaatgtcaatgctggctgtttcatagaacttaaaaattcaattctc

SEQ ID NO: 613 - DNA, 401 bp, Homo sapiens
gagaattgaatttttaagttctatgaaacagtcagcattgacattttatttttgttatctctcttctcacaattatgctccactggataataggaaaaacacttctttccttcattttttaaataaaattaatgttgtatttaaaaagtagccatgtagagacacaaaaataaatgaagaagctggacatggtgggatgggcatgtggtcccagctactctggaagctgaggtgagaggatcacttgagccctggaattccatgccagcctatgcaacatcatgaaaccccacttaataaatgaatgaacgactaagtcttgctcaaatgttattatgaggtactatgagtgacttacatgtgttttaaaatgtcagtgtgtttcccagaggcagaaataa

SEQ ID NO: 614 - DNA, 522 bp, Homo sapiens
ttttgtattttccttatttattgcctgtctcccctaacaagaatgtcagaacactccaggagggcagagattttgtgtgtcttgctcagttacaacacttaagatggtgctcggtacagagtagaagctcaatggatatttcatctgcttcacaatggtgctttttcctgattctccagccccgagcaggagtaatttcacgtctttggcggcgctgatgccatcctctttgaggtttttctcaatcgccttgctccgctcgagggcggctctctcctctgcgctcagagtacatcccatggtggccccttccctgccacagcccgcacgactcggctggcacggctccccggcttggagcgccccccacccccccagagagcagagcctgggctcaaggggggaaaatcacgatatcctctcctgggctggaaacaaaaatgtcgggaaaccagaaccctccaaaaagacagccgctaacaagattccagcagcggagactcgcggcagctggcaggggtc

SEQ ID NO: 615 - DNA, 571 bp, Homo sapiens
gaccgcatgtgctggatatatacctggcaggccttcaggtcagcttgatctccacctggctagtctgggtccccacccacatgtagacctcttggccattgtctagcaacatgatgtcatcatctgccaggtcatcttggcaaaagtcggagcatttctcagtcactgcaaagtagcccttctcgttggagcaccggaagagacgtgtgtgtttcatgtactcggcatcgtcatcatagggcttctgtgccccaatgcccacccagaagaagttctcaggctcctcaccttcgttgataacctgcttgctgtaggaggtgtcaaacatggtgttcaggatgtcttctgccaacttggcttcgtcagggtttgatgttcggttcactctggcatacatgtattccctgtttttttggcagttctcaaatgggaatctttgtgtttgtgtgtcgtattctcttgttgtgtgttgttgttgtttgtagtttctgtgttgttgttttttgtgttgtccctctgtgtgtcgtgttgttgtggtgttgctgttgttgttggttgtgatgtcgtttta

SEQ ID NO: 616 - DNA, 558 bp, Homo sapiens
  misc_feature (1)..(558): n is g, c, a or t
atgtatggcctatggacccccatcctagaaccagagaggacaatgatcttgattcccaggtttcccaggagggtcttggcccgnttctacagccccagcccaaatcctatttcaagagcatctctgtgaccaagatcactaaaccagatgggatagtggaggagcgccggactgtggtggacagtgagggccggacagagactacagtaacccgacacgaagcagatagcagtcctaggggtgatccagaatcaccaagacctccagccctggatgatgccttttccatcctgggacttattcctggggacgttggttncggtncccggtagccttgttaanccctcagaggnctttcaagtncttttccaccttttaacccattgcccaaccattaattaaggtttagtttttntttgcccacttaaggggntttgggntatgttggattagtgaattnggggccntgtcaattttttaattaacccaaattgaccattaaaacttttatttattgttaaaaaaaaaaaaaaatttcttnggccnaagttttttcct

SEQ ID NO: 617 - DNA, 381 bp, Homo sapiens
  misc_feature (1)..(400): n is g, c, a or t
attggtcagtttgggtgagtgacaaactgacatggccccagttcactattccacatatccaagcccctgaggtggcaagagaagctaagcttattaatggtgggcaatgggtgagaggtggaaaggacttgaaggcctctgagggttaacaaggctaccgggaccggaaccaacgtcccaggaataagtccaggatggaaaaggcatcatccagggctggaggtcttggtgattctggatcacccctaggactgctatctgcttcgtgtcgggttactgtagtctctgtccggccctcactgtccaccacagtccggcgctcctccactatcccatctggtttagtgatcttgggtcacagagatngctcttgaaataggg

SEQ ID NO: 618 - DNA, 403 bp, Homo sapiens
  misc_feature (1)..(400): n is g, c, a or t
gaaatccaacaattttattgtaatgagctgtattttctaaatttctcttttattttcctgttttcatacagtaaagaaaacaaaacgcagcacattcacattttcccgaggaactgtaaagatgatctctacagggataaacgttgtaaagcctgaagctcaatcaactgatgttggaaactctcaaagggagtaaaggcttgatctcaatggtctagaacatgtactgtaatttaatagaagagatggtcgtcttaatatttaatgatttaaaagaacttcccagtccatgcgaagagtacagtccaagaataaatcaaatttctgaaccgcattttatgctacatatgtgtatactttgcgatcctcaggtgttccgtgncaaataattccctcctccaat

SEQ ID NO: 619 - DNA, 196 bp, Homo sapiens
aagacgctgccctttaccgacacctggggacccttctccggcactgtgtgatgatcgctactgctggagaccgcacagaggagttccacggccacgcagtaacctcctggggaacttgcccctcaagtgtctggaatgttctcctcaccctggagccacatggagactccacggagttcatgggagtgaatatggg

SEQ ID NO: 620 - DNA, 450 bp, Homo sapiens
  misc_feature (1)..(455): n is g, c, a or t
gaagataccaactagagataaaaataccagaaacatacccatttaatccccctaaggtccggtttatcactaaaatatggcatcctaatattagttccgtcacaggggctatttgtttggatatcctgaaagatcaatgggcagctgcaatgactctccgcacggtattattgtcattgcaagcactattggcagctgcagagccagatgatccacaggatgctgtagtagcaaatcagtacaaacaaaatcccgaaatgttcaaacagacagctcgactttgggcacatgtgtatgctgggagcaccagtttctagtccagaatacaccaaaaaaataggaaaacctatgtgctatggggcttttgatagggaatggcagttattagtgggccttgttctttcaaattctgggggtgtaggagactggcancaggattggnttctggag

SEQ ID NO: 621 - DNA, 393 bp, Homo sapiens
  misc_feature (1)..(400): n is g, c, a or t
taaatttacacagacgtttaattagctttatttacagagcagggatttttttttttcagtctccaatggngcctagataacatcattaggcaagaatgccagtttaaaagaaatctatgcagaatcctaaaaataacagatgttggngctcctcaagaagaggcaagcttgactatatcagcagctctctatgcctcagttactcagaagcaattctgttgcagtctctacatcccatgattttgaagacaaggccactattactgcattcctatcaaagcccataggcacatagggttttctatttttttgggtgtattctgggactaggaaactgggtgctccagcatacacatgtgcccaaagtcgaggcgtccgtttggaacatttcng

SEQ ID NO: 622 - DNA, 323 bp, Homo sapiens
  misc_feature (1)..(323): n is g, c, a or t
taccaatctgaagtgggancngctatctttgcttagcaggggcaggagtgcacatcaaactgcccctgctaagcaaagatagcgttcccaaagatcctggagaacctaagacctcnanaangtggtgttnctggaggagtgganactgctgntanaggnggtgtctttgaatgttccaattttggaccgnctaggcaaatcagaggtggaactggtgcaactggtcatcgatggagtaaactatntgattgatttgtgaacggcgtctggagagaggccaggatatccgcatccccacacctgtcatccacaccaagcattaa

SEQ ID NO: 623 - DNA, 260 bp, Homo sapiens
  misc_feature (1)..(255): n is g, c, a or t
ttttttttttttttttttttttttttttttttttttgcatagcaaggagtctttactaggatggaggcaggggatgcgggggcaggtccagagcaagtagaatgggccatcattagaatgngcagaacncctgggnatcnttggagtcancagctgggcnatggggagttaatgcttggtgtggatgacaggntgtggggatgcgggatatccnnggnccncnnnccannnggccgntccaaaatnaatcnaaanagttt

SEQ ID NO: 624 - DNA, 491 bp, Homo sapiens
tttttttttttttaattaaaacaaattatttattccaagttctaccagtttaaagtttttcagaattacagaagcgaacaatgaaatcagaaacaagctctcacagctgtagcatttataacaaagtcattatctacatgaccttgatttaagaggtgtagagtgtttcttttattcagaatccatgaggaaagtttcgaagtccagatccaagtcggaaacgagggcacttacgaagtcatcaacagaaggacacttctgaagcataccttcaaccatgagcatgggctccctgcctccaccgtgggccagcatctccctgcgatacgctccccggcagccctgttgaaaggatcctgtagaaaacactccttccaaaccatggaggcgaccgctctggacatgaggtaagagtaatatctagcaccataccccacgaggtggctgaatcgcagctgccaggcagtatttggaacatatggtaggccata

SEQ ID NO: 625 - DNA, 418 bp, Homo sapiens
  misc_feature (1)..(420): n is g, c, a or t
ttttttgggggtggcaaaagagctttatttacacactgacaaggctcacggggtntcagctgaagaagtaggtggaacgnttcacctgctccaggncgaaggcccctggcttgggcaccgcctgcagtgtctccttcagctggctggcctccaagatcttctggggctcagagcagaaccgnttgaccagggaatntgggacaggtcctgcaggatggggctcgctgtgcaagcgggacaaactgctcccggcacacctgggttcatgacgggagacatcagctgcgtgagtccagtaacagtcgtgcaacagagacgaagggtcagggcccttccttttaggcagttcagggccggttagcatnattttggggaggaattccagcgagttggattaantttgggccggaagcctttt

SEQ ID NO: 626 - DNA, 349 bp, Homo sapiens
caggagttcgtgtgggaggcctctcactatctcttacgccaggtcttcaagagtctacaggagatgttctcggggacccgggccatccagcactggctgaccgagagtgcccgcctcatctcccacatgggctctgtggtggagtgggtcacacccctgggcgtccccgtcatccagccgtatcgcctgggactccaaggtcaagcaaatagggaggtgggaattcagagcatcaccttacacccacaacggagacatcagccgaaagcccaacacacgtaagcaggaaggaacggctttcccgcccaattttcatccatttcgttgggattccttccccacatggatg

SEQ ID NO: 627 - DNA, 415 bp, Homo sapiens
ttttttttttttctgcccagctggcacatttattggcattaaaacacaagacccttcccatcaccaggaagccacgcccaaagggtgtccctctgccccatttctgcaaaaactctcaggccttagcagtagcctgagctgcccccagggctgtgagctgctgaatcttctgactcatcatttccatgacggcctgtttcatggcgtgcttctcctgaagagctggttggattttctccatctgcttggttagaaaatctatcttcctcttgaagaagtccttggcatcctcagctgtcttctctacatagtacccagttcccacatcgatgagcacgtgttccacatcatgcagcttcccagggacatacatagaactcgtcagtgggacgagtaattctttcccctcgttgct

SEQ ID NO: 628 - DNA, 484 bp, Homo sapiens
  misc_feature (1)..(500): n is g, c, a or t
attaacatcacggagctgaatctgccgcagctagaaatgctcaagaaccagctggaccaggaagtggagttcttgtccacgtccattgctcagctcaaagtggtacagaccaagtatgtggaagccaaggactgtctgaacgtgctgaacaagagcaacgaggggaaagaattactcgtcccactgacgagttctatgtatgtccctgggaagctgcatgatgtggaacacgtgctcatcgatgtgggaactgggtactatgtagagaagacagctgaggatgccaaggacttcttcaagaggaagatagattttctaaccaagcagatggagaaaatccaaccagctcttcaggagaagcacgccatgaaacaggccgtcatggaaatgatgagtcagaagattcagcagctcacagccctggggcangctcaggctactgctaaggcctgagagtttttgcagaaatggggcagagggacac

SEQ ID NO: 629 - DNA, 639 bp, Homo sapiens
acatactttttcttttataaaaacacacaggtcaatgttttttaaaaacacagcataattgtacaaggggaaacattttgttagtataatcttaccaataatgtaagagaggaaagactgccatactgaaatacattttgctgctgccaaagacggtcctattgtgaagaaatgagaaagaaatagcaagcgccagggccaattaagcatccctctccccgtttttctgaatacaacacagtgatcctcaccgtaacccctacacatgttaatggattgttagagtatcaaattattttcaatgtgctttcttgttgtataaaccttaacctgcactttctatttagggggcaaaaagggaatgtgagtgtaaaaaccctgctcagtgtgtgtgtgttggactttggagcaattcaacaaacaagcctgctctctttaaactaattatggagtggaaggcttacaaaattctcccctcagctcctatataaaagaccatgactggaaggacagccacctctgggtgtgctggagaaactttgagatttaaacgggttttgattgcatgagagaaagcaaacggttagtctctcgtcagtcctcaagaacttacttaattgtggtggtgactaagcataa

SEQ ID NO: 630 - DNA, 494 bp, Homo sapiens
  misc_feature (1)..(494): n is g, c, a or t
ttttttttgactcaaacacatgtcatttttactttgaatagaaaacagatttttagaggctgggcatggtggctcacgcctgtaatcacagcactttggtaggctgagctaggtggaccactttaggccaggagttcgagaccaccctgtccaacatggtaaaaccttctctactaaaaatacaaaaattagctggacgtgatggcacatgcctgtagttccagctatttgggaagctaaggaggatcgcttgagctcaggagatagaggttgcagtgggctgagatcgcaccacagccctctagcctgggtcaagagagagagattccatctctaataaacaaacaaacaaaaaaacaagattttntggaccagggcggcaatggctcacacctnttaattcccagtgctttggggaggccaaggcaggaaggtttttttnaggtccagggatttcgaggccagcntggggcaaacacaggggagaccntttt

SEQ ID NO: 631 - DNA, 437 bp, Homo sapiens
aaatgtaaaactttctttcgtctgcatgtgctcagccatctaaattgagcaaatgatctggtgagcactgggttagaatcaggaatggtggaatacaatctgaacctctcagagcccagaacagagggttcctgacactgtgacactgtctcctggaactaagtatctcttgaatcatgacttggttttagatcagtcaagagagacccaggttttgccaggaatcgaatccctaaataacatgtttttttctcacttagctcatgaatttgcatagtagacagtagttctgaattagattttgaaaacctaatttcagggctcattttttcctgtgggccctaaatccattctattcaaattgtgtgatactgacatggcagtcatctgagggaacttcagcgtaggataacttggaggcagctccttcggcctct

SEQ ID NO: 632 - DNA, 409 bp, Homo sapiens
tgccctccacctcggaccacagccaggctccttgacaagcttgttggggagttcctggaagtgacttgcatcaatcctacattcatctgtgatcacccacagataatgagccctttggtaaatggcaccgctctaaagagggtctgactgagcgctttgagctgtttgtcatgaagaaagagatatgcaatgcgtatactgagctgaatgatcccatgcggcacggcactttttgaagaacaggccaaggccaaggctgcaggtgatgatgaggccatgttcatagatgaaaacttctgtactgccctggaatatgggctgccccccacagctggctggggcatgggcattgatcgagtcgccatgtttctcacggactccaacaacatcaaggaagtacttctgtttc

SEQ ID NO: 633 - DNA, 307 bp, Homo sapiens
aaagaaatttttaattccttgtctctcttctgatggctgaacagaactgcggtgtcaaatggaaagcagcacacaagaattcccttgcagaccttgatctttcgcagaaatgcaaagacgcctgagttatacaacttgcaattattattttctagacagaactgccaactgttgtgctttccagtgtatcagtggttgctacattctccttcttgtcttcgggtttcatggcaggaaacaggagtacttccttgatggtgttggagtccgtgagaaacatggcgactcggtcaatggccattgccca

SEQ ID NO: 634 - DNA, 347 bp, Homo sapiens
  misc_feature (1)..(355): n is g, c, a or t
cttttaacttaaaagtcttttattaacattaacttagcaacttgataatttattaaaataaccattatagacaaganaaatctcaaacatccttcaaaagtatagtctaaaaaattacaaaactgggtactgaccgaaaatgccaatttttccaaaaagtgagcaattccactaaggtatttcgcttcatatctcgatcctgaattgataagaactagtagtaaaaagaaaattgacaggttacatcagatattcaaaataagatttaatcaaggcgaaacattttaagatgtcaatatgacatgataatcagatttaattacatgagggtggttgtgcngatgggt

SEQ ID NO: 635 - DNA, 538 bp, Homo sapiens
acaacattcacttttcatcctgacaggatttccccaagcgtgctgcagaaaaagcagcatttaaatagagtcctgaggtaacagttttccgagtgcccaggcactcgagggcggagccgagtctggccacttgttgacagtgtcccacagagccagcctgccactaggcctctagcactgagctcttggcctccacatactccagggccttggccttgactgcctgcacatccttctcagtgccatgctgcttctcgtagtccaggtagcgcttgaagaagaacttcattctcttgggggccaagctcagatgaatgacccgctcaaagatgtcccggacgtccttctggctgccgtgcttgatggtcatgtcgatatagaccgaccagacatctgtgcgctttgggtaggtgctcagcgtgttctcaaaaatggctttggcccgctctgcatcccccagctgaaactcaagctgggcaaacttggcaatgacatccacatgcctcttgctaggcaggcacttcagggctcgctgcag

SEQ ID NO: 636 - DNA, 545 bp, Homo sapiens
tttttttcagagaagtctttcatcggtctcatttattgcaatattttctagctttgcatccagtacaacacaatgaagtattacagtgatttttatcattgcatcagcatatacaaatacagatcaaatgcaaataaagtgtgcttacagtggtgatccaaacataaaattgcaaagggaattctctttgaaagtgtaattatttttctccaatgtaccaggtatatatttttctctatgccaggtatacatatttgtcttcatcacatgtgacaaacatttgatgacttgtcactaagtaggattcatttccatagggcaactttgaaatgtgtggtccaaatacagcattccagcacatgacctcagcatcactgggttatagtcatgtacacaaagataaaccaactcgtatatgcgtgagtgcagcccatatacaaatctcactttcagaagccagaaggcaggtgttaatatgccagccttgccagggctcacattgaacttgacacagatctgagagtgtgactttctggaaagcatgc

SEQ ID NO: 637 - DNA, 513 bp, Homo sapiens
gcaattttggatccgaattttgatgtaccttaaacttccacatcactgcaccctgaaacagagcatgctttccagaaagtcacactctcagatctgtgtcaagttcaatgtgagccctggcaaggctggcatattaacacctgccttctggcttctgaaagtgagatttgtatatgggctgcactcacgcatatacgagttggtttatgtttgtgtacatgactataacccagtgatgctgaggtcatgtgctggaatgctgtatttggaccacacatttcaaagttgccctatggaaatgaatcctacttagtgacaagtcatcaaatgtttgtcacatgtgatgaagacaaatatgtatacctggcatagagaaaaatatatacctggtacattggagaaaaataattacactttcaaagagaattccctttgcaattttatgtttggatcaccactgtaagcacactttatttgcatttgatctgtatttgtatatgctgatgcaatgat

SEQ ID NO: 638 - DNA, 479 bp, Homo sapiens
  misc_feature (1)..(480): n is g, c, a or t
tagcaattgacacattttaatacaaaccagtctacattcattcctaaaaggctcatttccagtaaaaaatatacaccagtagaaacttctcccagaactggggcagaggctgaggagacctgggccagattccccaagactngacaggcagccagcttgagccaggcacaggaagaggctccagggcgaacgggggccctgctccatcttcaggttcaggcgggagactcccccacagttnnnntaggnnaggcactcggggccacatccaggcaagcaccacccccctgccctccacggcagccttgggagttggacgcgtcggccaaggctgctgctgttgctcctccaaagaaggttgggcttcaaggccgtgtccagggacccacgagcagaggcactggggggcaagggatttccaagggggcaagggatccctaaaggggggtagctcacaggtgaagggggtttaagncctt

SEQ ID NO: 639 - DNA, 436 bp, Homo sapiens
  misc_feature (1)..(436): n is g, c, a or t
gtgtcagaccccgctgtcttcctgagccctgggntcactngtggaggagctgacggcctgggccttgcaggtcctggctcttccctgggcctcaccagggacactcttgaatgtatggcctcagncgctccctagagggggcctaaaccccctcacctgtgagctaccccctttagggatcccttgcccccttggagatcccttgccccccagtgcctctgctcgtgggtccctggacacggccttgaagccaaccttctttggaggagcaacagcagcagccttggccgangcgtccaactcccaaggctgccgtggaagggaaggggggtggtgcttgcctggatgtggccccgagtgctcccctccctcccttctgtgggggagtctccnggcttgaaccttaagatggaggagggcccccggttcgccctgg

SEQ ID NO: 640 - DNA, 434 bp, Homo sapiens
tttttgggtagggatggtatgaatttaatattttttagtattacaatatattcttataaaaaaggtgcaagtgaaaaaggacactgtagattatgtccattagcctcatttgtcatctgaggcagctggtgagaacagccttgggtcgaaggcatccctggtagaagtcgggggagatagatagtcacagttccccagttggtggaaatgggatgggagtagggagaggctggaacagacccttccccattcacctggagaattttctcctcccactgccctaaacactttatttccatcacaggggagaaatgctgctgagaaggttgtgtttgttaggttgatgacgaattttacattggccacaaaattagctagagaaacttatctaaaggtggcaggagcagtggggagggcatgaagaaagcaagacc

SEQ ID NO: 641 - DNA, 430 bp, Homo sapiens
aaatacgttgttccagagctcagccttctcacgcgtaaaagaaagatatttttctatttattttctacatctggccagtgctctggtgctagatgccactgtagccagatctccaacagtgccttggaccatggactcatactcaactgagtaagaaggggctggtgccagtcggggtggctgagctggtccttaataggttgtttcttggtcttgctttcttcatgccctccccactgctcctgccgcctttagataagtttctctagctaattttgtggccaatgtaaaattcgtcatcaacctaacaaacacaaccttctcagcagcatttctcccctgtgatggaaataaagtgtttagggcagtgggaggagaaaattctccaggtgaatggggaagggtctgttccagcctctccctactccca

SEQ ID NO: 642 - DNA, 533 bp, Homo sapiens
  misc_feature (1)..(533): n is g, c, a or t
ttccactttcacattaaaatgaataactatatttttaaccctctattcataacacacacaaaaaggttatattaggcttttctacagagagtacagaaatagaaaagtcactactaaatacaaataacattgacagttaccaagaaagaagaatttgcagctgtcactgtgccgtagntntgatgaatgcaggttttagtttggccatctgctccagtgaggaaggacggatgccattatctttgggaactgtatcttttcctattaaaaaaatgaatttttttaactctatggggaccacaagccttatatatcttctccacagggaatatgctttaaaaattaccaaaaccaaatggnaatataaacccttccctattcactggaggggaaggnggttttataattatcctattntccaaattttaacctnagggcttnaaggccatggggggnatcctcctnatggctttcctaaanggggggcnccccnttttcntaggggccntccttcccggccgggccggnttctg

SEQ ID NO: 643 - DNA, 430 bp, Homo sapiens
  misc_feature (1)..(430): n is g, c, a or t
tgtgaatgaatgtcttaagaaaatagggtgtcctatttttagtaaagcatttagatgatttcccaattgtcttttaagactttagtttaaaatttgataatatgataattataaaacactttccttctagtgaataggtaaggtttatatttcatttgtttttgtaatttttaaagcatatttctgtggagaagatatataaggcttgtggttccatagagttaaaaaaattcatttttttaatagggaaaaggatacagttacccaaaggataatgggcatccgtccttcctcactgggaggcngatgggcccaaacttaaaacctggcattcctccaggccctacgggcacagtggacagctggccaattcttctttcttggggtaactgtccatggttatttggtatttnggtaggtggncttttcc

SEQ ID NO: 644 - DNA, 178 bp, Homo sapiens
caagtttcagttatttattgatttaatcattgtaatctccaatagagattacaatagagatctccaacatgatttcatgcatttagaggagaaatatttcctggttaagtggaaaattgtgcggatgtggcttctggaagaccttcattctaaagcagcgttatagtgaaacatttca

SEQ ID NO: 645 - DNA, 468 bp, Homo sapiens
gatgtagaagaaagctttttaatgcaacagcttaaacacacagttcaacaaaatcagtcaattcaaattaacttcaacatattacaaagaactatgaagcccggagaaggccactgttggaacaaaaaaccaagtccctgcccagaaagcatggacactgaccaaggaggcctcttgccccctcccacctctaggaggagcagccacaatcactgggctctttaaacagcttaggtgcctctctgcagaaggcagcagcacagagtcaaggacaaccattcaagggtcagggctctggcttcccaccaaaggagggcccgaacagaaggcactggggctcagacataggagactgtgcaaggacaggacagggcagggacagcagctgtacacctggagagactgcagccctggagaaccagctcaacaggctgctttggatcagggccttaggtttatccccctcct

SEQ ID NO: 646 - DNA, 479 bp, Homo sapiens
  misc_feature (1)..(479): n is g, c, a or t
tgataccttgttaagctaggtggctgagtcgcttatggttttaatgcaatgagcaatgtggatatgaccaagagttgttgtgcaagttgacaaatgccaaatagaaaaccacttggccatttatttctatgttcactaaaaatcctattgccttgtgtgattcttaatctcttttgcgaacctttcagtctccgctagctctttcctaatgagctttacagcaggaagccgttttatcgttaagtgccccacaggggacatttaccagggggggctngggagagttctccagatttggggagaggcgcagagacagtgttttgagcccgagncctgttttcagcaatccaccgggggggggagntaggagtnttccnccctnccctttanccatttnaggacccncggagggaaaaagcccagnttttgttngcacccccctggggggtttnagggcgagntttttncgggggttttaa

SEQ ID NO: 647 - DNA, 492 bp, Homo sapiens
  misc_feature (1)..(500): n is g, c, a or t
tgtngttctcctggctgtttattacagaacgaagaaaaaacacactggcttgaaacagacgccagatttcaaatgtagaggtgaaatacgaggtggcaattaaaatgtgattacagaaagtctggacactgagaaaagtttacaggacagtgggtgtgggttttctataacagacacttaaatatacatgacgataattgcagatagaaaccatcaaagacaaaccccaaatcaactaataatgtttacagatgttcccccccaaaccacagagccttacatcaaaacaaatacttgaaggctttaaccgggggaccagctcgcctttaaccccacgggggggtgcacacagctggggctttttctctcgggtcttgatgggtaagggggggggggatctctgctcctccgggggggtttcttaggcagggctcggcttcacacctttcttctgcgcctntcccaatntgggggactntcccgctcnggggg

SEQ ID NO: 648 - DNA, 468 bp, Homo sapiens
gttttgtaaactcgagggattattatttcttaattggagaaagagaagacagcatttggtgacaaagtcatacaggtggatgtcagggagagtgatcaatcaaaggatgggaactggaactgagaacccagcaggtacttctaggaagactcagcagtcagtggtgacggtggctgagagctcctggatgcgccaggccgtgcaggccttgcacaagatgtgcccatccagcgggtagctgccctgacactcgccctcagaggagagcagcagcccacactcctcgcacttgtaacagccaatgtagaaacttcgatccagagcgacaattctcacagtctcctcctgacctggctcaggcattatggccccaccgcacaatgagcatcttggggcagacttcctgtgaaagtcctcaatgcagtggttacggctcgtagcatccactgtgaaggggatgccgtcgag

SEQ ID NO: 649 - DNA, 550 bp, Homo sapiens
acgggccccaggtgcccctgagccagcctccagaggatgagctggataggctgacgaagaagctggttcacgacatgaaccacccgcccagcgtgagtactttggccagtgtggtggctgcggagaagatgtggttggggatggggctggggttgtggcccttgatcgcgtctttcacgtgggctgctttgtgtgttctacatgccgggcccagcttcgcggccagcatttctacgccgtggagaggagggcatattgcgagggctgctacgtggccaccctggagaaatgtgccacgtgctcccagcccatcctggaccggatcctgcgggctatggggaaggcctaccaccctggctgcttcacctgcgtggtgtgtcaccgcggcctcgacggcatccccttcacagtggatgctacgagccagatccactgcattgaggactttcacaggaagtttgccccaagatgctcagtgtgcggtggggccataatgcctgagccaggtcaagaggagactttgagaattgttgctctggattcaagtttc

SEQ ID NO: 650 - DNA, 357 bp, Homo sapiens
  misc_feature (1)..(466): n is g, c, a or t
caaccntgggaaggttcaggggccgctctttcccccatgtgcctgtcacgctctggtgcagtcaaaggaacgccttcccctcagttgtttctaagagcagagtctcccgctgcaatctgggtggtaactgccagccttggaggatcgtggccaacgtggacctgcctacggagggtgggctctgacccaagtggggcctccttgtccagggtctcactgctttgcaccgtggtcagagggactgtcagctgagcttgagctncccctgggcncaagcaggnttgttgatggggcgagtcccggagccccacccagacctgaatgttcttgagagcaaagggaaggatttgacgagag

SEQ ID NO: 651 - DNA, 430 bp, Homo sapiens
  misc_feature (1)..(430): n is g, c, a or t
atggttggggnttttttcctttaatttggatgtacaatntttgcagcagttaaaaaattaaatatacatctctcgtcagtccttccctttgctctcagaagcattcaggtctgggtggggctccgggactcgcccatcacagccctgctggctccaggggacntcaagctcagctgacagtccctctgaccacggtgcaaagcagtgagacctgggacaaggaggccccacttgggtcagagcccaccctccgtaggcaggtccacgttggccacgatcctccaaggctggcagttaccacccagattncagcngggagactctgctcttaggaaacaactnagggggaaggcgtttcctttgacttncaccagagctttnacagggcacattgggggggaagaagccggncccttngaacctttcaggg

SEQ ID NO: 652 - DNA, 482 bp, Homo sapiens
tttttaggtaacaaggatttacactgacatatggggtgttggtttggctctattctttttcggttaccacttcttgcagtgtaggtggagatgcctctgttccttcttcccagccctcagcaacaccagcaagctcgtagtgctttttccgaagctctcccagtttttgacgctccttctgcaattcattttctagctctagcaccctaacctgagaatccatctcttggcgtttgatctgtgtcagcgtcatgcttgagaagtccatgttgtctgtctcttcgatctgtgatttgccggaaatggttgaggccacaacgccggcagtggcctggttcactccccgagaggcctgctgcagctgggcctaggtggggctgccctatcagcttttaccctggatgcagccacaaggctgggctgtgctagccagcaatttcatgagaccacaccattagcttccttaaatttcctttggcctg

SEQ ID NO: 653 - DNA, 401 bp, Homo sapiens
ttttttttcagtggaaaaaagtgactttatgatgaaagagtgcagacaacagcttagcactttaccgaccttcgccaagattttttggggcccatctgcccgtgcacggcccatctgtgacctctccatgggcttagtgaggtgtaggcacaaagccctaggctggcagccctaactagctggaacctgactctccctggaactgcttccttgccatggaggactcacatgatctcagagggcctctggttttataagcgttttttctggccccttctacccctcagggattccaagggaagcggggtgtgtgcttgggagggttgactgtaaactgaatagagcaagagtgggacagagtagttccaggactggaaaagtggcagcagggaaaagaagag

SEQ ID NO: 654 - DNA, 821 bp, Homo sapiens
  misc_feature (1)..(822): n is g, c, a or t
ttttatgggaataaatacttgttaaacttctcttataaatatttattaaaacgtccgataacacaagccaagggctgtaaaattaaggttaaatcaagactgaatttcccgcacggaccagcaggaaagccagttacctaaaagagcctaatccccaaatccgctgaaggtgcagggcggcctcagtcccggggcatcttgaactggtccttctccctgcgcacggcccgcatggtggtcaccgggtccgtctcacctgcgtgctgctgcaccgtcttctccctcactctcatgaaggggttgtaggtaaactcctctgccagggtggatggcactgtgggctccccgatgctgtacttctccttggcccaggccagcttctcccggatggcggcattgccgggctccacgtggcgtgcaaacttgaggttgttgatggtgtactcgtggccacagtagactcttgtgtccggggggagccggcccaagacctccagcagagctttacacatctcatccgcagtcccttcatagaacttcccgcagncagccacanacaangtgtcacctgtgaacacngcagggggctccgagcctncgggcttgctcacgaagtaacaaatgtgtnctgaagtgtggcacggggtcggcaggcactttgacgtcagagaccccacctgcagtgtggacaggtgagtgatcttgtgagtcaggctccngatacggtcgtcacccccgtcaaccttcaagtccgacttcagcttgaccaggtactcattacgngcagcatggtcccagttgttgttggtggtgagcactgt

SEQ ID NO: 655 - DNA, 389 bp, Homo sapiens
  misc_feature (1)..(444): n is g, c, a or t
ncttacgacccatgtatatctatggggaaggaagccgattcctttctgctagtataaacgaggccctgaacaacaatgggatcctgtcaagtgttggaaagttctccaatgttaacccagtctatgttggcaatgtggcctgggccacattctggccttgagggcctgcaggaccccaagaaggccccaagcatccgaggacagttctactatatctcagatgacacgcctcaccaaagctatgataaccttaattacaccctgaggcaaagagttcgggcctncgccttgattccagatgggaggtttcctttatccctgatgtattgggattgggtttctgctgggaaataggtgaggtttcctacttaggggcaattttacaactt

SEQ ID NO: 656 - DNA, 292 bp, Homo sapiens
  misc_feature (1)..(300): n is g, c, a or t
actatgtgaaggaatggaagattaaaaagaaaggaaatcctttctcatttaagagtagaaatggagctctagtagtcaaaacgaccctcaagttaaaagagtccctaaattgttcagaatcagctactgagatttggtaacagcaaaccacatggtctttcctctggtatatgattaggacagaaaccttcttgttgggccaatgactgcgcaggttttgatgacatgaggnatacaataagttggccnttgtatgaaagggaggcagcaggacctgagcttgtgcccttgt

SEQ ID NO: 657 - DNA, 366 bp, Homo sapiens
  misc_feature (1)..(366): n is g, c, a or t
gctcagtgtcctggttactgcagcggcanaagcagcaggtcctactatcgcctccctctagtctctgcttctctggatccctgaggagggcagaaggtactgaggaaggttaaagggaccagccttggagtatttccccactctgagactcagctggccacaggcaggtntctgaagttcctttcttccaagccagtgattctggttcttgggacaaggtgttgaggaacactaggaaacagaggggactgtgacctgggggactttttcttgcagggaaggaaaacagcccaaagatgaggagtgatttcgcgtngggtacccgcaagnagccagcttgcttcgnattacagacgggacagtttt

SEQ ID NO: 658 - DNA, 342 bp, Homo sapiens
  misc_feature (1)..(342): n is g, c, a or t
tttgtaaattttctccatgaaagcctagagtctggcctctgattcacaatcttcccagcctacggtgttagaggtggggtggtcaagaagtgaagacagatggtccttgacttacaatagggttacatcaatactcctgaactccagatgcgggaactttctctgcagctgggctctncttcgcagggagctggttcccaccacactcttctctggcagggtttctagggtcttcccaacaaattttgggtgaaagacaacagcatcatgagggttttcccgcttgcagatggctccgatggtgaagccagggagggaagcacagtgggcaggtccttcaag

SEQ ID NO: 659 - DNA, 541 bp, Homo sapiens
  misc_feature (1)..(540): n is g, c, a or t
tttttttttttttttacttcaattgtaattttagttccagagaaggcagtgctgtcttaaaggcttggacaagattttctttttctcttactccaggaagatcacttaacaacaaatatttgaggtttcttaaatgacgcaaagcaatgatgcctttgtctgtgatattcccacaggatattatttccatttccaatatggttttttgtaaattttcaagttgactaagtctcagcaaacagtcatcctcgatataatgacacttgcacagccttattttttcaacatgctctaggccctccatgtgatcaaatccaatgctcatgatacaagagtcggtggcgtcgatcgcctgaatcttgtatttgtccagagggcctgttggaaggtggttgtagtccttctngccacctctcctggccatggtagcgcaccatggnccccacagcgcnnaaaccactcgggatgccgccctgtcaggggcaacatccctgatgngatcataatccaccttattaaacaccgcattcaancagnccca

SEQ ID NO: 660 - DNA, 605 bp, Homo sapiens
  misc_feature (1)..(606): n is g, c, a or t
caaatgatgctgtttggaaaaatttcccagcagttgtgtggcgtaaagaaactcccatggtcatgtgactccagatacttctggggctggttgaatgcagtgtttaataaggtggattatgatcgcatcagggatgttggccctgacagnngggcnatccgagtggttgctgcgctgtggggccatggtgcgctaccatggcaggagaggtggcagaaggactacaaccaccttccaacaggccctctggacaaatacaagattcaggcgatcgacgcaccgactcttgtatcatgagcattggatttgatcacatggagggcctagagcatgttgaaaaaataaggctgtgcaagtgtcattatatccgaggatgactgtttgctgagacttagtcaacttgaaaatttacaaaaaaccatattggaaatggaaataatatcctgtgggaatatcacagacaaagggcatcattgctttgcgtcatttaaagaaacctccaaatatttgttgttnagtgatcttcctggagtaagagaaaaagaaatccttgtccnagcctttaagacagcactgccttctcttgggacttaaattaaaattgn

SEQ ID NO: 661 - DNA, 524 bp, Homo sapiens
  misc_feature (1)..(524): n is g, c, a or t
aaatttttgggaatttattgatttgcatttaaaagggaactgctgacaaagattcactggtaataatttgaacaagttggaaaatacagtcaacattactgaaacactactaaaataattccaggacagaacaaaacttcttagatgctgtctttgatgtgaaaattgactgcttcttacttttctaacacacggtggtataattaacaatattcaatcacttctattctttcctgcatatataaaaattaaaataccaattaaaaaactaatatatcttctctttatttcttacagatatgagttcaatgtttcactcaatagtgctgtggtttaagagaattttttcatttacaagttaaacaacaatccgcccaaagggaactggatagtctataggctccatagtgcaaataaacagtttaggnatgcagcaactggacatttctaaagtaccaaaccggataaantcttagaagatacatggcaaaaagctctactaagcagatggccncaggactang

SEQ ID NO: 662 - DNA, 269 bp, Homo sapiens
  misc_feature (1)..(269): n is g, c, a or t
gttgngtatttaagccagactttgttggatttgaaattccagacaagtttgtngtaggatatgcccttgactataatgaatacttcagggatttgaatcatgtntgtgtcattagngaaactggaaaagcaaaatacaaagcctaagatgagagttcaagttgagtttggaaacatctggagtcctattgacatcgccagtaaaatnancaatgttctagntcngtggccatctgcttagtagagcnttntgcangtatcttctaagaa

SEQ ID NO: 663 - DNA, 687 bp, Homo sapiens
  misc_feature (1)..(699): n is g, c, a or t
ctaaaaaccgtagaattgatctcttcttccacagtagatggccatacttctcacgggctttctgatgtgcttctttgtgttcctttcgcttttcttctattattttcagatcctcctgacctttctcctgttcttgttcatatttcctccagtcaacaacttcacgtgcccttggctcagattctacttcaagaatttcttctcctgcagaaggaaggtctctccagcctgtaattcccactggcatgctgggataggcctcatcaattgtttttccattttcatcaaacattaagcgtacttttgcccaacattttccagcaaccagaacagagccttttcttaaagttcctctttgaattatagctgtagtaacaagacctcttcctttgtctgtgaaagactctattactgttccttccactggaccattgngatctgctttcaattctaacattcctgcaagagcaactgttgcttctgccaaagccatcagattatcgccccgtaggcggagacaggcactgcttgaacatcacctccataatcttcacataccacatcgaaagccagcagctcttttttcactttcttcagatcagccttagctttgtcacatttatttacggcaaggataataggaccctgtgcatntttggcatgctgaattgaatcttcagttggttt

SEQ ID NO: 664 - DNA, 199 bp, Homo sapiens
gagaccttgggtgttccctgcttccttggaggaatggcacgggggctgttaggccgcaaccaccccctccacatccgggagaaccgcagtgcgccctgaagaaggcggatgtcattgtcctagcaggaactgtgtgtgacttccgcctatcctatggccgtgtcctcagccacagcagcaagatcatcatcgtcaatcg

SEQ ID NO: 665 - DNA, 136 bp, Homo sapiens
ggtggtttattcagtctccataagagaggggacaaacggcacagttgggtccgtgaagaggagggtccaagagctcacaagagagcctctctgagatttgacccctccatcccctcctcagggaggttgtggagtc

SEQ ID NO: 666 - DNA, 457 bp, Homo sapiens
tatttttttttctaaacttttattgaaaaaaaaaccgaggaggtgtgctggatcccttttcagaaaagccgcttctcatacgaatggaggctatggacgccaccttccacctgggctgaggacgttctcttctcaaacttaagctccccagagtacatcatggctcggacttgggtcaagctcttggcaccaatgtcctggcatgagtgttggatgccagcaatcaggtaagggacaaatttgtggattgaccctttgtcctgcacagcaccagacactccctgggccactttgattttgtcagcttcactgaaatatctgttctggctgctgaggtgcttgtccatggcatcgagagaacccataccgggataatttctttagccggatcccatcggaaaaagaagttttcaacaggggtctcaattgttgcaagcaaggaagagcccctcatgac

SEQ ID NO: 667 - DNA, 556 bp, Homo sapiens
  misc_feature (1)..(556): n is g, c, a or t
tttttttttngttatttacatttttantgtaattttaaantcctggntcccaagaagncttggnttnaatttncttttcttcataacaaacaattctgtctcccacttgaaattccatattgtcttcatctaaactgagnaccacaatccattcccgttttgaacaattgaaatgtcatctttatggcngtttcaatggaggttaatgagtcccttccaaattacatgtccattacgggttagtttaaatttttttngtttttctaactgtcccttttgggactctgcagccagccacaggaacttttttcttcccttctgttacagagaaggtagctagtatagatgcctcacctactgggtgctcttccacagcacaggggaatctgctgctcagntcctcttgnaaatnttcaacaagncggtaaattattttgtgaagtttaatttgnctccttttttngcagctgactgttgggataacattgcctgcattcacattaaagccatatataacaccatcaattgtttcagcnagggnaacacnttggcactt

SEQ ID NO: 668 - DNA, 294 bp, Homo sapiens
tcctgaccatgcatcccctggatttctgagtttcagtcagattgtagatgacaatataagctgccttccgaaattgtcaacatctgaatgttaagtccattttccccatggaagaagcccgtagttccatgaagtatggattaccatttgtatttttcactaacagtaaatgtatttttcttattaattgtttgccttagggaatgatgaattacattttttgttccttctttaccattaaacatctggcattcctcaggcttcaggccttccttggtatgttgtttcttttat

SEQ ID NO: 669 - DNA, 359 bp, Homo sapiens
  misc_feature (1)..(466): n is g, c, a or t
atctttctttgttcttcaacaattctcaacntgttcttcggccagtttgggttgtgcttctgcaatttttcggttattctcttccagtattcgctctagctcctcacgttttgcacgttcttcctcctaaaggggaggatatgttaagatattagaaaaacaaaatgtttatttttattgataaatatttactaatcttcctctgaacttttttgatatgacttacagggtagctttatagctacccttctgtctgacaaaatggataaactgtgcaggtcacctaaaaattgggnttctaggcacctaaattttaaatcatccccnccccaggtcccaaacaggcaacccaacttaaa

SEQ ID NO: 670 - DNA, 560 bp, Homo sapiens
  misc_feature (1)..(566): n is g, c, a or t
tgtatattcctttttaatattttttttcacttgtgttgatcatttgccttaaattaactttctactttgtttaaaacatggagaattagcaagctgccaggaggccaggcagggaaaccaggatgtttccatttaccttgttgctccatatcctgtccctggaggtggagagctttcagttcatatggaccagacatcaccaagcttttttgctgtgagtcccggagcgtgcagttcagtgatcgtacaggtgcatcgtgcacataagcctcgttatcccatgtgtcgaagaagataggttctgaaatgtggagcacatgttgtttaggtataaaatcagaagggcaggcctcgtgaagcgaggcggcaaaatttgatttcttggaggacacctgagcatataccggtcaaagtctgatgacaacaccagtagggatgaagctgggaattggggtggctaagaacactggacctgacactattagacatgggtccagcttcaggtctattactgntcactgtggccggcaacagngctacttaggnaaaatggtgatggt

SEQ ID NO: 671 - DNA, 533 bp, Homo sapiens
  misc_feature (1)..(533): n is g, c, a or t
cagccaatcattcattgctcaagtgtctgaagcagccatggagaagtacctgagctcgccagtgaaatgatggcttattacagtggcaatgaggatgacttgttctttgaagctgatggccctaaacagatgaagtgctccttccaggacctggacctctgccctcctggatggcggcatccagctacgaatctccgaccaccactacagcaagggcttcaggcaggccgcgtcagttgttgtggccaatggncaagcctgaggaagaatgctggtttccctgcccacagaccttccaagangaaatgacctgngcaacttnctttcccttcatcttttgnagaaaggtangttagccaaagagcaaggcaagtagattcttccactttggtgtccctccttgggaaggtcattaaaggcccccagccaaacttcaattttcccccagaagccaaaagncccctttaaaggggtagaaagggccaagcngggaagaccaaacaaaagaaaggctggaaaaccaaagcaagtca

SEQ ID NO: 672 - DNA, 602 bp, Homo sapiens
  misc_feature (1)..(602): n is g, c, a or t
tttggttcatgttctttattgaacaccttacatgggtatggacagggcctatgggtggcatagtcaaaggcgaactttgcaatccgctgagacttggctcgtgtgacaatcttcaaacactcaatcacaccccttgcactctcatgttccagagagctgtactccccttctgtctgctctcgaatgatcaccaggtctagattgttgtgccgagtcatatacccaggaagtgacttcacatggactacgttggcaaataagtccaacttacgcctcagccgcatatcataggaggctagctcccccttatactccatcggggtatgaatctttccaatgatggccactttgttctccttcatggaactcagcacctgctccagcttctcctcagatgccatattctgcacctcactcaggtggtgctcctggaactccactgggacagcggcagccttgaacacctncttgacggcgtgcatcagctcangccccacaccgtctnccgggagcatggtcacggggaaggagccctccaccctcacgtcctcggnctggcttcgcgatgcaacgtgcgcggcgggcgaggtactcagacctct

SEQ ID NO: 673 - DNA, 352 bp, Homo sapiens
tgtgaagagctttttagtagctaaatatggcaccatgtgttccaagggcaatataaattacagtatgcaaaacatactgactggctgaggtaaaacgcactgctcctgcctcacgtcaccatgagggggaacacacatatgcttttaaaaacatctggcttataaaaaaacatcccctagaaaggcctccagagaggggctgtgaggctcaccctctgccgcgctcaggaggacccgccggctcagccctggcccctccactgcagccatgggtggcgcctccccctactgcctgcccagggctctgtccaggttgctcttgatggtgtcgaggaagtccgtggtgttcagg

SEQ ID NO: 674 - DNA, 465 bp, Homo sapiens
  misc_feature (1)..(465): n is g, c, a or t
atgagagaaactaanacngttaataagacaattgtgattgtgtggattcaaagacgcacatgcactgtgtgttcaattattttgttgtcttgagatttaatattctttccaagagcttttaatgaagcagagagctagtacttcattttcactggatacattttcagcatcatgagttgtcacagcctctgagcccctgatctgaagccagaagggctgagtgtattgtaaacttattcttgcatgttgctgtctgggaatggaccacactacagcaggtagttctgggggcgatactgccgaaaggcccgaacacatgtattttggctgcaattgaggaacttgggatgctattaattttgtatttcagcaactgccccttctcctatcccaaagcaccaattactgccctctgcctcagcagtaccagtataagatgacattccaaagactggaggcaactca

SEQ ID NO: 675 - DNA, 314 bp, Homo sapiens
atatctgagtttgtttattgttctgatttactgaaacttaaaatattccatcaaattatccaggaaaatccaggtggcagaaatatataatatgtccatttcatcaagaggtctcaaataaattttaaaaggccagaaaatgatatatatactatgccatttaaatcacttctatcttctgtacttaagaactcaagtatagaaataaactgtgggctgaagtaacattgtaacctgctcccaacatgactgcataggtgtctaaggttaagtgtgaagattacttgtgaggtctcaatgttacttgactaatc

SEQ ID NO: 676 - DNA, 572 bp, Homo sapiens
ggaaaaacagtttgtgtgactgcaggatcggcaccctctctgatcaacagttctagtactcttctttgtcagtatatcaacctacagctcctgaatgcaaaccacaagagtgtttaatggggacagtgggcactctcctgcttgaaaacccacttgggcagaatggactcacccaccaaggtcttctgtatgaagcagccaaggtgtttggccttcggagcaggaagctaaagctgtttctgaatgagacccaaacgcaggaaattacagaagacatccccgtgaagactttgaatatgaagactgtgtatgtttctgtgttaccaacaacagcagacttctagcatgtacttatcaatggttgttcggtcagcccttccctaattacacctatcccctacacatacatgcacatagacacacacatgaacacactgaagatatttcctcaggtgtgtgtaaatatgctgcctggattgaaattcaatgggattgattagtcaagtacttgagactcacagtattctccacttaaccttgaccctatgcagcatgttgggacaggttacatg

SEQ ID NO: 677 - DNA, 441 bp, Homo sapiens
cccagcggcccactcgcttttgcccgtggacgatgcaatcaatgggctaagcgaggagcagaggcagcttcgtcagaccatggctaagttccttcaggagcacctggcccccaaggccaggagatcgatcgcagcaatgagtcaagaacctgcgagaattttggaagcagctggggaacctgggcgtattgggcatcacagcccctgttcagtatggcggctccggcctgggctacctggagcatgtgctggtgatggaggagatatcccgagcttccggagcagtggggctcagttacggtgcccactccaacctctgcatcaaccagcttgtacgcaatgggaatgaggcccagaaagagaagtatctcccgaagctgatcagtggtgagtacatcggagccctggccatgagttaagccccatgcaggctctgatgtt

SEQ ID NO: 678 - DNA, 161 bp, Homo sapiens
gggcctgcatgaggacatagtgggaaagccgttacatatctacttgccaagagaggccattaagtacatgagagaggagctaaggatgtcaggactagtgaaagtatgcattaaaggcttctgcggtggaccagctagcctcacctcgtctggatcccagc

SEQ ID NO: 679 - DNA, 486 bp, Homo sapiens
tttttttctaacgccaacacactttatttcccttcggacgcatctgcaagcttctgccacacctgaacccacggcctggcaccaacgctaccatcactccccagaggtcaatcctgggggctgaggagctgcaatttccctttcttcctgaaaattaagagaactgagactaattgaagaaacctcactgccattcctcactcagcagtctcagcaggtctgaaatgtggctgtgggaagttgccattttgggaaggcgtttattctctgcggctacagggattgcctgctttagaaatccccttacgctgattaactcaaaagtcccttcagagtcaagaaccaacctttcatggtccataaatgtggtatttctggtttcctgatcaggaggcttgcaaacctaaaaatgttcttccttccaaaaactaactaacctgaagtataaaacctcagacggcagaattttctatttctggaaaagct

SEQ ID NO: 680 - DNA, 148 bp, Homo sapiens
gaaccaattttttttttacttagatagattcaataaaaagaacaaacacacacaaacacaaacacgtcttaaaataaactctttagagactaagtgcgtgtttcttttccacagtacggtgcagagaggggagggcagggggcggggg

SEQ ID NO: 681 - DNA, 311 bp, Homo sapiens
agcaacggctgtcagctgctgcttggggtcaagggacacgccttctgaacgtcccctgcccctttacggacaccccctcgcttggacggctgggcacacgcatcccacatggcgtccagggtagcaggcggtgggcacccaccgtgggaccgtaggggcgccgcaaaccacactggactccggccctcctaccctgcgcccagtccttccacctcgacgtttacaagcccccccttccacctttttttgtatgttttttttctgctggaaacagactcgattcatattgaatataatatatttgtgtattt

SEQ ID NO: 682 - DNA, 439 bp, Homo sapiens
gtcaggaagcaaagtacagccccagcaggcagcggacctcgttgacggcggcgatgcagcccaggaagaccatgagcatagtgattgttcccacgccgatgaagaaataagaccccctcctaagcgagctggaggaggtttgcaggacagagatgaaaatgctcttgtcggccagggatcacaccccgaagcccaggatcactgcgcccaggataaagaagatcaagttgaagaggaagagaaagtatttggtgactttgatacaggctgagccatcccgccagtcctggagcttccttccacgaaaccagtgcagctggtcacagggcccacttctgcctgtgcccacgtgtcgtacaaacagcagcagggaggactctgcagggttctgatttctgctccgcgctgcaggaccagcggtcaccgctcgcctcgtgcc

SEQ ID NO: 683 - DNA, 392 bp, Homo sapiens
tttttttttttttttttttttatttttaactgagattttattatgttgacatttgtttctcattccacatcatcttcagccaagctctgagcacttacaattctctgactaattgttgggagcttagtcagaagcatctggaacactggtggtggaagagtttgctgtaagacctgcagtaactgctgtggctgtccacacacagcaattgcatttgtcagatggtctacgcccttctcatattcaccttgagctagtaactcttcaccaagctgtatttcttcaaggaagaacttctgaacagcttcagcatctttaaggtcaggtaacttggaaagcccagctctctccttggcaagcttctgtttctttcttcgtatcaattttaattc

SEQ ID NO: 684 - DNA, 488 bp, Homo sapiens
tagcttctaatttggacacagcaccaatactacacacactattgaatgaatgaccacatcttcctggttcttccattgggcagggtcaatatgcttctttggactgaataggtgtgatcttgtttgagaaaagtgtgtaaacgtagggccagattttgttcgtctccgttccggaaaattggtggagcactcctcggctcttgtataattcaatgactggctttgccacgtctttgtactgtcttagcctggcagcaactgcttcgggtttatcatcctcctgctggactaatggttcaccagtgacgtcatcaataccatgtacatgaggtggattgaagtccaggttatatacccttccgctaggagggtgaatccaacggcggctgagacgatctttaagtgtttcaaatggaatattcaaactgatcactagatccacttcacagatttgtccagggcttcggcttgtcctatgtcctaggaaa

SEQ ID NO: 685 - DNA, 442 bp, Homo sapiens
  misc_feature (1)..(442): n is g, c, a or t
tgagtgtcttaacatttttcctctttagctttgatctgattgacttcttaatgctttggaacaaaattctagatagccacctgttgcagactattctacttttctgatttcaaagaaagggaacagattgttctccataaaggcctcttggggcanaaggacatagtaaatttccaagggaaaagcacattgatccttgtcgtagtctactcaacagacttccaaacgtgtgggtgattctaactcgggtttggggcttttctttaaaagggtatcttgactaaaaggtttgtgtggaaatgtgatgccaggggggaatactcccntacttgttaaaaccccaaaaaactggggggggaaaggaatacatacaattaacctttaccattnccaaaggcngggaagcntaggntttccctttttagggnagttttnttttttt

SEQ ID NO: 686 - DNA, 528 bp, Homo sapiens
  misc_feature (1)..(528): n is g, c, a or t
tttttttttttaaattaccaacttttacttttataatcatttgagtgtattacaattttatattatacatttttttcaattcaaattttcagactgaaacattgttattttagtagagtcaatttataggcaatttgcaacagtgatttctcatggaaaaaagacacagacagacagtaatcattcagatctgtggaactgaatgaccatgaaaaccgacctcctgcaaaccatgcaaacagagatatgctgacccattcagcagcagcatcttcacgacgagctgaataaagacacatcttatgtcatgcccaaaatgtaggggcaagactcaaagctgcagggtaggtaaaatgttcttataaagggcaagatccnggggtgctgctcgctgcaggtgcttcacaggactataccacttgccttgccagtggncttggtggactctcccacggcaggcaacagtgaggcatggggngcactcggcacttctcagagggnaggtactttcccggttgatgaggagga

SEQ ID NO: 687 - DNA, 467 bp, Homo sapiens
acttttagaaactgatgtttattttccatcaaccatttttccatgctgcttaagagcctatgcaagaacagcttaagaccagtcagtggttgctcctacccattcagtggcctgagcagtgggagctgcagaccagtcttccgtggcaggctgagcgctccagtcttcagtagggaattgctgaataggcacagagggcacctgtacaccttcagaccagtctgcaacctcaggctgagtagcagtgaactcaggagcgggacgagtccattcaccctgaaattcctccttggtcactgccttctcagcagcagcctgctcttctttttcaatctcttcaggatctctgtagaagtacagatcaggcatgacctcccatgggtgttcacgggaaatggtgccacgctgcgcagaacttcccgagccagcatccaccacatcaaacccactgagtgagatcccttgtt

SEQ ID NO: 688 - DNA, 442 bp, Homo sapiens
gcaagtgtagggaaggaagcgttcgtgtttgacttgtccattcggggttcttctcataggaatgctagaggaaacagaacaccgccttacagtcacctcatgttgcagaccatgtttatggtaatacacactttccaaaatgagccttaaaaattgtaaaggggatactataaatgtgctaagttatttgagacttcctcagtttaaaaagtgggttttaaatcttctgtctccctgtttttctaatcaaggggttaggactttgctatctctgagatgtctgctacttgctgcaaattctgcagctgtctgctgctctaaagagtacagtgcactagagggaagtgttccctttaaaaataagaacaactgtcctggctggagaatctcacaagcggaccagagatctttttaaatccctgctactgtcccttctcacagg

SEQ ID NO: 689 - DNA, 194 bp, Homo sapiens
tgcagcaatgacgtttaatacttctggaatgattaggaatctgagaacagaccgtgggcggctatgctgaccagggctccggatgtggaagctgggccctgcctccttgcaggggactctgcccagctggaaggggcaggcagctcggcaggccctgaccggcaagcgggcagtgcaggcagcccagcagcagc

SEQ ID NO: 690 - DNA, 613 bp, Homo sapiens
  misc_feature (1)..(603): n is g, c, a or t
aacacctttgttgcagagctgaagggtttggatccagctcgagtcaacgtccttgtcattggtggccatgctgggaagaccatcatccccctgatctctcagtgcacccccaaggtggactttccccaggaccagctgacagcactcactgggcggatccaggaggccggcacggaggtggtcaaggctaaagccggagcaggctctgccaccctctccatggcgtatgccggcgcccgctttgtcttctcccttgtggatgcaatgaatggaaaggaaggtgttgtggaatgttccttcgttaagtcacaggaaacggaatgtacctacttctccacaccgctgctgcttgggaaaaagggcatcgagaagaacctgggcatcggcaaagtctcctcttttgaggagaagatgatctcggatgccatccccgagctgaaggcctccatcaagaagggggaagatttcgtgaagaccctgaagtgagccgctgtgacgggtggccagtttccttaatttatgaaggcatcatgtcactgcaaagccgttgcagataaactntgtattttaatttgctttggtgatgattactgtattgacatcatcatgcctt

SEQ ID NO: 691 - DNA, 433 bp, Homo sapiens
tttttgggaagggaccttgaaaaataaaatcaatgacggcttttattgaggcgcccacagagccacccacaatttggaaggcatgatgatgtcaatacattaatcatcaccaaagcaaattaaaatacaaagtttatctgcaacggctttgcagtgacatgatgccttcataaattaaggaagctggccacccggcacagcggctcacttcagggtcttcacgaaagcttcccccttcttgatggaggccttcagctcggggatggcatccgagatcatctttctcctcaaaagaggagactttgccgatgcccaggttcttctcgatgccctttttcccaagcagcagcggtgtggagaagtaggtacattccgtttcctgtgacttaacgaaggaacattccacaacaccttccgtttcattcattgcatc

SEQ ID NO: 692 - DNA, 579 bp, Homo sapiens
agagtatgaaggtaagatgaagcagatatataagaacatttttagataatgacaatttttccttaaaatttggtgaaaatttagtttcttctcaaaattctgtacttctatccataaaagtaaatttctattttagtagctctgtaagaactaggccagagaagagtattacccataatagtaaatagcaaatactttggcaagtctgaattagagtacaagtgaagacattcacaaacacactttttacatctcctggatgtggtacgggctgtatgttagaattaaagcatcacaactatctgattgtagggtgctggtgggcaatgcaatcaatcaacacgtctaccccaacagatgtggagacgcatggaaaaaatacatcaaccaaagtggtcaggggagaacaaacacagaaaacaccattaaactggagacattatctctttctggctgaaaaaggggtttcctggagcacagaaaggatttaatcaaggagtgcctctattcttgtatcacaagagggcctgatgcagattctggccattctacccattttggcagcaggaatcaatattc

SEQ ID NO: 693 - DNA, 476 bp, Homo sapiens
tcacttgggccattttggaacccatttatattgtgggtgttactctgggcttcatctagccccatactagcctctgagactgcctcagaccgtctgaacattcatggcttccttgggccaagtgtagctgtccagtgtaaaggagtcatagtctggagtgtagaccagggatcttacaaaagcctccttgtccttaggctctgggtagtaggaagccaggttgtgtttgtacgcgtagtcgagaactttgatggcaattctcaaagacacgtctcggatggtgctgagtggtggatagagtctcccctgggacagatgctgctcagagacttcctgggcaatttgctctgctgtcaggaggaagatctcatctgggatgtgccggatcccgccggcgatgactcccagtgccaccccggggaacacgtaagcattgtttccctgcccggaatgaaggtcttgccatcttccagagt

SEQ ID NO: 694 - DNA, 482 bp, Homo sapiens
tttttttttttttatgttttgtttgttttttaatcattaagagtttttgtacaaaaggtgatggttttttttcttcattttaaaacaccagggtgtgggggagggatgcaaacaaataacaaaaaagatgcttttgtaacattattttccctgtttagaaagaaaaaaatcactccaatagtattgaaaagtccaaagatgaaatagtttcattttcttttcctaaggcttataaaaggccccctgcctgttgattccatccctcttttgtgtccagtggagccatgttactcttcagtggcccaggggttcactattaaagaaagatcagtccaggtttctgggcacatggcctaaacaggaagatggaagcatcagaggattaaaaacctttccccacagaaatgtgggcaagaagacacttccctgagccagcagaagggacaggtgcagcagcattccccaacccagcgcagaggaca

SEQ ID NO: 695 - DNA, 402 bp, Homo sapiens
atcggggtgactgtatagctgggattgggctaaggactgtggtcttatctgtccacatacagccaaaatgcctatccagaaatccagttcgttggaaaggaaaattggtactcctgtgccacaggggttccagaaaagggaagtcactttaccttgcggtggtgggatcctgatgtctttcatccatttgtagtaaaagctggtaaagcttttcttactcctggttccctaccagtatttctaaacatgtcgcactttctccacaggcatgtggttttgacctttttttcaatcttctagaaagggaacggaagcagaagtgggacatcgagggctctgctgtcctctgcgctgggtgtggaatgctgctgaactgtcccttctgctggctcagggaagtgt

SEQ ID NO: 696 - DNA, 262 bp, Homo sapiens
  misc_feature (1)..(262): n is g, c, a or t
tcacttaccttgcactgagaaagaagacaaaggccagtatgcacagctttcctccactgctgctgctgctgttctggggtgtggtgtctcacagcttcccagcgactctagaaacacaagagcaagatgtggacttagtccagaaatacctggaaaaatactncnacctgaagaatgntgggaaggcaagttgaaaagccggagaaatagtggcccagtggttgaaaaatttgaaggcaaattgcagggaatttcttttggg

SEQ ID NO: 697 - DNA, 342 bp, Homo sapiens
  misc_feature (1)..(342): n is g, c, a or t
ataaaacagtagaaacaaggttgactttattccaaacataaaacacttattttgtgttagaagagttatcccttgcctatccagggtgacaccagtgactgcacatgtgttcttgagctgcttttcctccggcaaagactcatgtctcctgtctctttctgtcttgaaaggatatgtttgtcactgaagctgctctctgggatcaacgtcagagttgcatactctagaaaagatctttgcaactctggcctatatgaatccataagccacaaacttgncttttttgtacccaccattttgtggaactaaattattatcagntacaaaaanggggctaacatt

SEQ ID NO: 698 - DNA, 507 bp, Homo sapiens
agaaaacaactgtgtttaatgacaatcctcagtttaaaaaaaaaaagaagaagaaggtttatacacactgtacacacatttacaatggctttggaggatagcagtgctgcgaaaagggcttcaggaggatccggcctgggacaggattgaggtatgttgcagcctccagggcctggggtctcctgcatgaagaatacccctccccatttgactgtgaactttttggcctggattctggagaacagatttccaggattgtcagccagaaggcagacagatgcaggcacctaccaagacctgacctcaggaagtggccctgccctacagcccagttgctcagccagggctgaaggccatgggtgcccagcacccttgcttcagtgccagcccctggaaggaacctcacaacagggatacagcaaggacactccagttcccccagtcctgccatggtgctaccctgagggacagggatggagacagggcagccaggtttgccaggacctg

SEQ ID NO: 699 - DNA, 328 bp, Homo sapiens
  misc_feature (1)..(328): n is g, c, a or t
tgagccaaaatatatatacttaattttagttatgccagaagtaagtataatttctcagtccaaggatgttaggaagcaacttacagagcatgcttcaaataganttctcttggcctttgaaggtaactattttcaaacttaatagtagagtcaagcaagantggacaattagagtttncaaanttgaaaantattatgtattttatataatcattacctatggtttacagattttatttttatgatacatatctctaaggtaggtgggtacactgaggacataggcaantatgccaataaatacttatttaagctggaagtganctaa

SEQ ID NO: 700 - DNA, 289 bp, Homo sapiens
  misc_feature (1)..(289): n is g, c, a or t
gtgtantgttanccccttgannttcagcaagattaacacnggcatggctgacattttggtggtttttncccgtggtgctcatggngacttncatgcttttgatggcanaggtggaatcctngcccatncttttgganctggttctggcattggtggggatncacatttcgntgaggacgaattctggactacacattcaggnggcacaaacttgttccncactnctgttcangngnttggccnttncttaggtcttngccnttctngtgatcccnaggncgtaatgttc

SEQ ID NO: 701 - DNA, 347 bp, Homo sapiens
  misc_feature (1)..(347): n is g, c, a or t
acaaagcagggagaggtcatgttggtnnggaacgcgtcacaggggggacgtgccgcggcccatgtggggggctcgtctgtggggagggctgccccactgggacctggggacggaggcatngtgcgtcangngganaccaggcagcagtgtgggtggggttggtggcgccggcacagagaggggtgggcccccagcccgaggatgctccctccagggccggagaggctggcggcggtgcggctgactgggcacccttctggagcggccanccctcggctcgtcagtnaacacagtccctcactaggggacagctncgtccttgccacctgagcctgcccagccctggc

SEQ ID NO: 702 - DNA, 478 bp, Homo sapiens
tttttgccggctgtacaatttattcagtgcacattatttacagaaataaatgtatgggggtggacacggaacccccgcagccccaccccttagctggctctccggttctgcagggggcagaagctgccggacccgcacttggtgccagtgcacaagaaaccactcgcagaggccagcagaatccttccccctcaagtgccttggggatcctgggtggcagactccactcgctcagggccatggggaagtagagccagctgtacagtaccatttcccacagcagccacggcctcttgcttgctttgggaaggaaaagaggaaggaggcatctgtcctcagggctgagcacaggagggcagcctcttaggccacaatgggctccttcgtggggttcacagtctgatgcgcggctggcctatccccaccagtgtctctcctcccaggaccctgggggcacagggagctggaggggaggaac

SEQ ID NO: 703 - DNA, 471 bp, Homo sapiens
attcggcacaggggtgctcagggggcgcctgtggttctgagatggctcccaggggctccctccgcccccaggtagggcccctctcagccctcacacaccctgtctgccccgccctcattatttatgtccaggtgtttgttttgttttgtttttggcaccttacttgaccatttgtttctgtttccccgactggggcagggtgtttagaattttctaaatgtagttctgctccagacagggaattaggcccccatcatcctctggcttggcacagccaggggagcagaggggcagaggcccacattggaagagcagcacctcctcagcctgaaccccagggctgtaactgccaggctctctttgcccagttggagactgtctggcccccctggtcccctccttcccaagtgagtctctctgggccttaggaagagccttccacccaggggcagccccaggccaaaggggacc

SEQ ID NO: 704 - DNA, 269 bp, Homo sapiens
  misc_feature (1)..(269): n is g, c, a or t
ngttgcagaatactcactatttccaaatagcccaaaatggacttccaaagtggtcacctacaggatcgtatcatatactcgagacttaccgcatattacagtggatcgattagtgtcaaaggctttaaacatgtggggcaaagagatccccctgcatttcaggaaagttgtatggggaactgctgacatcatgattggctttgcgcgaggagctcatggggactcctacccatttgatgggccagganacacgctggctcatgncnttg

SEQ ID NO: 705 - DNA, 499 bp, Homo sapiens
ttttttttttttaaatttaccatggaataaacattttatttatttgtgtatgtaacatttattgacatctacccactgcaagtatagatgaataagacacagtcacaccataaaggagtttatccttaaaaggagtgaaagacattcaaaaaccaactgcaataaaaaagggtgacataattgctaaatggagtggaggaacagtgcttatcaattctgattgtgcaacaatgatatacaatccaatgaatgaatgaatggatgttctgcctgaagtttctatttctttcttgaattacttctctttccatatagtttctggaatgcctttaatatcatcctgggaaagtttaaaattttggggatctccatttccataggttggatacatcactgcattaggatcagaggaatgtcccatacccaaagaatggccaagttcatgagttgcagcatacaggaagttaatccctagactgctaccatccgtccagcggtc

SEQ ID NO: 706 - DNA, 848 bp, Homo sapiens
  misc_feature (1)..(848): n is g, c, a or t
tgagaggtgttgaataatctttaatattacacataaaccacactaaaatgcctttcaataagtaaaagaaaccattttaaatacagggaattataattagattggcatagttaaggccaaaactatagacattgctaccttatttatcttcaacccttgcctttaagaggcaaatgaacatgaacacaaaacacaggtgaatcttgcttggttctaagacagtgaagcaatttccccagtatttaaatatattcacataaccagttatataaatctaaatataaaaccaatctccagtaagttttaagatggcactcaccatctttgtgaaaagttgaacattactaacgaagtctaatcatatctttaaaaggggtaaacagtgataccatttactgaattggagttactattaaaattcaaaaactgaacatattcatttaaccacaagccagtcttagttttaaatcaggactgcccaacagaatattctgtcagtcattcatgatctgaattctggtgtatgagatctattaaaggatggtacacataaaaaagtcatgagacatttctggtttgaataaataaggcagtggccaattattactcattagtagctcttttgagataagctattaagtctggcctttctcncttcttctaaatgcgacaaagatcatttttggtccagggatgtacttcttgggattcttcaaatactccatcagtgtattcttttcccagatgatgcccttggtcttattggcggtggggaagagaatcagggcctggacctgctttcggccaaaaggcaatgggaatgtggccagattgtggttgctcctctt

SEQ ID NO: 707 - DNA, 365 bp, Homo sapiens
  misc_feature (1)..(365): n is g, c, a or t
ncaacaaaaaacaaaggtgagaagagagggcccagccaccttccactcctccctttncnacagaacagaataccagtttgtatccggcaaactggctccttccccagggttggtcccagtggggatttacatggcactgcaaagcaggacgggagccctagtcctcagggcactgcaggatgtcataggtcacgtagcccanttggtccacctggttcaactcactccgggaactcacgcgccagtagaagcggtcctgggcagaaataggctttctctcggtactggaagacgtcgtgcgtntccaaaggcaccccggggaaacatccggtccacctngttggcgntccggggntccaccatct

SEQ ID NO: 708 - DNA, 439 bp, Homo sapiens
  misc_feature (1)..(444): n is g, c, a or t
gcgcgctcaccttcactcgcgtgtacagcgggacgcagacatcgnatccagtttggtgtcgcggnacnggagacgggtatccttcgacgggaaggcgggctctggcacacgctttcctcctggccccggcattcagggagacgcccatttcgacgatgacgagttgtggtccctgggcaagggcgtcgtggttccaactcggtttggaaacgcagatggcgcggcctgccacttccccttcatcttcgagggccgctcctactctgcctgcaccaccgacggtcgctccgacggcttgccctggtgcagtaccacggccaactacgacaccgacgaccggtttggcttctgccccagcgagagactctacacccgggacggcaatgcttgatggggaaaccctgccagtttccattnatcttccaaggccaatcctaat

SEQ ID NO: 709 - DNA, 576 bp, Homo sapiens
ttttaaaggttagagaatccaagtttattagaaacactccaacaaaaaacgaaggtgagaagagagggcccagcccacctccactcctccctttcctccagaacagaataccagtttgtatccggcaaactggctccttctccagggttggtcccagtggggatttacatggcactgcaaagcaggacgggagccctagtcctcagggcactgcaggatgtcataggtcacgtagcccacttggtccacctggttcaactcactccgggaactcacgcgccagtagaagcggtcctggcagaaataggctttctctcggtactggaagacgtcgtgcgtgtcccaaggccaccccggggaacatccggtccacctcgctggcgctccggggatccaccatctgcgccttcacgtcgaacctccagaggcgccgccgctgaacagcagcatcttccccctgccactccggaggccccggtcacctgggccacgtcggctcccaggcccagcttgtccagacgcctcgggcccagcaccgacgcgcctgtgtacacccacacctggcgcccagagaag

SEQ ID NO: 710 - DNA, 391 bp, Homo sapiens
  misc_feature (1)..(444): n is g, c, a or t
gagccggccgcagcgccttccttatcgccgacaagtggccggggtggcccggaagctggactcggtctttgaggagccgctctccaagaagcttttcttcttctctgggcgccaggtgtgggtgtacacaggcgcgtcggtgctgggcccgaggcgtctggacaagctgggcctgggagccgacgtggcccaggtgaacggggcgctccggagttgcaaggggaagatgctgctgttcaacgggcggcgcctcttgaagttccaccttaaagcgcacattgttgatctccggaaccccaagcngttgaaccggatattccccggggtgccctttgaaaaacgcgaagtttttcacgtatcccgagagaaagcctttttttgtcaagaaccg

SEQ ID NO: 711 - DNA, 477 bp, Homo sapiens
tttactttttttgagacggggccttattctgtcctccaggctggagtgcaatgacatggtcatgcgtcactgcagcctccacctcccgggctccagcgattctcctgcctccctgcctcagcctgggacctgagtagctgggaccacaggcatgcgccaccactcctggccaatttttaaaatttttttgtagagatggggatctccttatgttgtccaggccagtcttgaactcttgggctcaagcgatcctcccacctgggactccaaaagtgctgggtttacaggcatgagccaccacacccagctcctccccctcaaacttctgtgcacaaagtgctcccttcccagaggaggggccccatcggtgtgtaaggtggcctattcctctgtgtgttctctggatcttttcagccctgtggtccagtgtccatcacagccatgctgactgagtgactggagacagggatgatggag

SEQ ID NO: 712 - DNA, 418 bp, Homo sapiens
  misc_feature (1)..(418): n is g, c, a or t
gagaacccancntggccccctttgagcccctggtttctggcatcctgttgttgctgtggctgatagcccccagcaggcctgcacctgtntcccaccccacccacagacggccttctgcaattccgacctcgtcatcagggccaagttcgtggggacaccagaagtcaaccagaccaccttataccagcgttatgagatcaagatgaccaagatgtataaagggttccaagccttaggggatgccgctgacatccggttcgtctacacccccgccatggagagtgtctgcggatacttccacaggtcccacaaccgcagcgaggagtttctcattgctgggaaaactgcaggatggactcttgcacattcactacctggcagttttcgtgggttcctgggancagcctggaggtttagc

SEQ ID NO: 713 - DNA, 420 bp, Homo sapiens
  misc_feature (1)..(420): n is g, c, a or t
gagacgttgtctcgnctctattgccaaggctggagcgcagtggcgttacatcacctcactacaaactctgcctcctgggttcaggcgattctcttgcctcagcctccagagcaggtaggaccacaggcatgtgccatcatgcctggctaatttttgtatttttgtagaaacggagttttgtcatgttggccaggctggtctcgaactcgtgacctcaggtgatctgcctgccttggcttcccaaagtgctgggattagaggtgtgagccactatgcccagcttgtttatacttttattaactgactttcttttcattcattgaggcatacatcccttttataaaaataatgaaggctattttgaaaaaggtcacagnataaattccatttncatgtggattttctaggatntttggggtt

SEQ ID NO: 714 - DNA, 512 bp, Homo sapiens
ttcagaaattcataccacaccagacagatgtgttttattaaaaaagaaagaaaaccctttaatcagaaagtctgattaaattcaatagtaactcaaactcttaaaaaatttctggaaaagtcaacaggatacatacatcacagaaaagcaggcagctgctgacagttctttggtggaaaagtaagttgcgtacttacccaagctgcccaaatgattatcaagccaagtttgtttttcaaaaataggttttaagatacaccaaagaaactatacaatacaaaaatttaacaatgaagttaaagtatatagcaaaagccaaatatgacaacacacatgtataatgtagaaaagaatcctttcagtcctagaaaactaaaatggggagaacttactgaagggtaacatacataaaatgagtactaatagcaaggaataatcctaaacattttcccaataaactgactaagcctcaaaaggacagcttaggaaaatgattaacatgcagtttttct

SEQ ID NO: 715 - DNA, 512 bp, Homo sapiens
cagtcttaaacaaacttgtttctaacggcccatggtaggcatgacaacagcaggtgaggaaagagtagcatcttcttctttccactgagaagtaatggtctttaactgagtgtagaattggatgccctgtttgccatagaaattggtgtctcccctgaaggaggatcgagagccggtgaatgagaacattggcaaaggcactggaatggggacgattcactcccacctgtccaacatccaccaagtgggcatatttccgagcagtggctccattggtggtgaagatggcagttccatttccatatgggttgttatttacaatctggatggcttcatccaatgtttctgtctccagaaccacaagaactggaccaaaaatctcctctttgtaacaggtcatatttgggctgacattcgagatgatggttggtccaacaagtttgccttttcataggctttcacttaatttttctgcatcaagaaggtggaggtccctccttgttacatatcaa

SEQ ID NO: 716 - DNA, 800 bp, Homo sapiens
  misc_feature (1)..(800): n is g, c, a or t
aagtgaaactgtatgtacatacttatagcatgacaccaggcctataagtaaggtattttaaagtaaagctttcaaggaaagtacaaatcaggtattgaaattaaattgaagacatagctttactctcttctttgatcataactaaaataatattttagacaaaagctaaaacaaaaagaggatattatacagattgctgcttcttttccaaacacttctcaatatcatcaagcacctgaacggcagcctttggaattcgagtcccaggaccaaatacattggaaacaccaacttcaaacagaaattcataatcctgaggtggtatcacccctccacacatgacaagaatatctggccgtccaagggagttaagttctttgatgagttcaggaactagggttttatgaccagcagcgagggtgcttacgcccacagcatgcacattcgaattcacagnctgctgggccacttcacgaggagtctggaaaagagggcctatgtccacatcaaaaccaagatcagcaaatcctgtagcaataacttttgctcctctgtcatggccatcttgtcccatttttgctacaagaagacgaggtctgcgaccttcacgttccatgaatntatgaaccctcttgatagcagatgttatctctttactttctccaaattctggcgatatgctccactcacccatcgatcattcgccttatggtcaccaaatacctttntcagggcatctgtgattnctnccactgtacatctttggccgagatgcnnatcactgcagagccangatattt

SEQ ID NO: 717 - DNA, 441 bp, Homo sapiens
  misc_feature (1)..(441): n is g, c, a or t
tacagaatacatatttctttaaatagtttgcagtataaagactaaacaaagctagaggggtactgtatctttaaggcagtaccaatgaatcaatacatttataaaatggaaaagggttagtatggatttcttttcctctttctttctttttttttttctttttggttgctttacattctttcaattaaactttacatttgatttccaaggaagtcacaggcataaaaatctcaaatcaagtttcccctgaataaaaatggacagacatttctctgacgcaaaatcctcttgctcagaaagctaaagtctgtggtgaattcagttcacagatactgcacacttatttgtacaatactttggaggcatttgtagttgtaaaatagaatatacaagtctgtttcacaaaattctaaaaataaaatatatccnggggctattgaa

SEQ ID NO: 718 - DNA, 450 bp, Homo sapiens
  misc_feature (1)..(450): n is g, c, a or t
cctatagtgtccccacaaaaatgggatccaaactggaagacatcctgatggacgacaccctttctcccgtcggtgtcactgatccactcctttcctcagtgtcccccggagcttccaaaacaagcagccggagagcagtatgagcatggaagagacggagcacacttgttagcgaatcctccctgcactgcattcgcacaaactgcttcctttcttgattcgtagatttaataacttacctgaaggggttttcttgataattttcctttaatatgaaattttttttcatgctttatcaatagcccaggatatattttatttttangaattttgtgaaacagacttgtatattctattttacaactacaaatggctccaaagtattgtacaaataagtgtggcagtatctgtgaactggatttcaccacagactttagctttctgagcaag

SEQ ID NO: 719 - DNA, 441 bp, Homo sapiens
cattctttaaattctttatttcatgtctgtttcagcagtattgaaatataggtttctcatacgtgcaattcttttatagattcaaaagtgaggtgttgtgtgaatgttacaaatcataacatgatccaaatttataagaaagtactttaaaaatcagaaaaagacttaagaattactatgttaaatttctaatccaaatgtaaaacaagaatacaggatattggcaatgctaatattcaaaatgggtttaccccagttcataattcctctgctcccctcctacctaaaatctaagaaagtattcattataaattggaagtacagaattcttaaaaagccaactggatgctgagttgtatgattttctttacaggtacaatttacttttcagcaacctgtaagccatggaaagagtaactccatatcccacaaaaaactcaa

SEQ ID NO: 720 - DNA, 459 bp, Homo sapiens
gcgacccggcggcgggacaggcttgctgcttcctcctcctcggcctcaccattccagaccaaaattgaaaaaagtggttgacctcacccaggtaatggatgatgaagtattcatggcttttgcatcctatgcaacaattattctttcaaaaatgatgcttatgagtactgcaactgcattctatagattgacaagaaaggtttttgccaatccagaagactgtgtagcatttggcaaaggagaaaatgccaagaagtatcttcgaacagatgacagagtagaacgtgtacgcagagcccacctgaatgaccttgaaaatattattccatttcttggaattggcctcctgtattccttgagtggtcccgacccctctacagccatcctgcacttcagactatttgtcggagcacggatctaccacaccattgcatatttgacaccccttccccagccaaa

SEQ ID NO: 721 - DNA, 431 bp, Homo sapiens
  misc_feature (1)..(431): n is g, c, a or t
gaagaacagtcccagggctccaccacaaatagtgactggatgaaaaacctcatctcccctgacttaggagttgtatttctcaatgtacctgaaaatctcaaaaatccagagccaaacatcaagatgaagagaagcatagaagaagcctgcttcactctccagtacctaaacaaattgtccatgaaaccagaacctctgtttagaagtgtaggcaatactattgatcctgtcattcttttccaaaaaatgggagtaggtaaacttgagatgtatgtgcttaatccagtcaagagcagcaaggaaatgcagtattttatgcagcagtggactgntaccaacaaagacaaggctgaattcattctgcctaatggtcaagaagtagatctcccgatttcctactttaacttcagtctcatctttgattgtgtggc

SEQ ID NO: 722 - DNA, 613 bp, Homo sapiens
tcatcaatccaatttattaagtcctcaatgaaggggaggaagggccacatctccctctgcaggccctttgaccatcttgatggcttctgctcctccctgtcccctcagctctgccttggtttccccactgacaaaggggatcttctgctgtcctgtgtgccctgaaactaaaacccagggggaggccagaaatcctcagaagttttccagctccctgcaagaatagccaaggacagagaaatcacaggatcaggacgagcagggcaagctggagcagggggtagaacagaccaagtcctttaccgcagaggaagaaaccacactgtggaagggaaataaatagaggggtccagggcagcagagcccaggcccccaggcgcagtggctataggcgcacaggcgaagtgggagcccccggcgcttcagccactgaggaagagacgcttgtaggccttgttcatctgctccaagaagatgaaggtgaggacggtgtgggggcccaggcggcgatagtacggcgtgaagccttccacaggctgaagaagccctcgtagcggacaactttgaacagcacgtccagcccgttcttgtattccggcttcccatcaatcat

SEQ ID NO: 723 - DNA, 442 bp, Homo sapiens
  misc_feature (1)..(442): n is g, c, a or t
aatttgaaaatagagtgatttcattttaaaaggagattttagattagtaagaaattgttactctctgattttatttctccatttgtttcttctcaaccctgagatgaagatccttctgatatcttctaagataaaatttgttcagcatttagagcattatttttttctatttagtcctctattgtactagtacctattgctgcctaacacattatcctaaaacttaatagcttaaaataacaaacatttattacctcagtttctgtgctcagaaatcccattgtaacttacctgggatgcctctgacttgggggtctctcccaaaggctggcagtcaagcatcagccggggctgtagtcatgtcaaggttctaattgggggaggaatctgnctccatacctactaataggtcccntgggcaggacntcagggtccnttcgtt

SEQ ID NO: 724 - DNA, 455 bp, Homo sapiens
  misc_feature (1)..(455): n is g, c, a or t
ttttttttgataatttatgattttattgtctttcctttgtccggcctttaacatgtttctgtaatttaaataaaaatctatttactttctccattttagcaaatggtttctttacccaaataggttgcactatagtccccatatggttttctactgttccacaaccactatttcacaaagattgacaaaactttaataaaagttaaatttacaggacatcttaaggataacttggggaaatatgtaggtaaaaaaggaatcgagtccacaaattaaggaatattttgctaatatggcccaacaccaatttcaggcaaatccaatctacttaactcatatatttaatgtggggtaatttttcttaaccaaaatttangggggggtatggantggatattatttatggcccttggacaagggtggacngtgtggntttgttgtggactagggngggg

SEQ ID NO: 725 - DNA, 531 bp, Homo sapiens
ttcatgctctctttttaatttcagaagtcatgtacaatcacattgtgaaacttgggaaacaacgcttccttccttcaaagtcagttctgctattcatgtggacctaatgtctctaggaccttgtgccctcattagtggcctggaaggacgcccagaccttccggttcatcaagggttgaagtgggcgatagttgttcaccatcatcttctcctcttcaccaagtgcagaaaacaggagagtacgaaatgcagagagctggcttggggccacttcaacgggctccttctggatgatccaggtgaccgactcggtcagcggcggggtggtgagcgagcccgcgtaggtccagtaatcccagcaggtgggcagcagagtggaggggtcgaaggggcgcatggccgcgccgcgtcctgagagaccgagaagcacaggacgtgtcagtcctcaggggagactaggagcttccatcttgtctcagcacgtgaggccttcatggtgcttggaaggaagtgctttcccccagataaggc

SEQ ID NO: 726 - DNA, 308 bp, Homo sapiens
  misc_feature (1)..(308): n is g, c, a or t
ctcccagttttcatgatgaggaagtgatggtagcttttcatctgcccagaagttaacttttgatggatttgccttctaaggcatcaaacatgtcttctaaggccttctccacacattggagaaactcccgggcattgcggcctgggtaggaagagacattgcagcctatccagttgtcatgaacagcatacccaacaccaaaagcatcagagaccacaggggcaaacctacaanggttcacctgctgggctgctcagtgtgctcgtggacaggacattgtggtttatctgcccgtatgcagggtccag

SEQ ID NO: 727 - DNA, 409 bp, Homo sapiens
  misc_feature (1)..(410): n is g, c, a or t
acgcaaacaaggaaaaaattatttttattatacaactatttaataattttacccatgcattctcggtctgaagaggtttgggaaatattcctttttgtaatgatgtccagagctaaaagtaaatattcctcctgggccaaaagtctctggaacctattcagtttctgctgcctcttcaccttctccacattcaaaccgcacaaagtctactaccgacaccccctgaggctgcacatactgccccaaggtaatggagggatccagcaaatacggctgggacagaatcttagtctctgcctctcccccaggctcatcgtccagggagccaacagagaggggggccatgccaccaacattgctgcccaaggcggcggccaacgtcttcaaggtttgttttctgttcagancc

SEQ ID NO: 728 - DNA, 404 bp, Homo sapiens
  misc_feature (1)..(404): n is g, c, a or t
gtctgaacagaaaacaaaccttgaagacgttggccgccgccttggnagcatgtggtgggcatggcccctctctgttggctccctggacgatgagcctgggggagaggcagagactaagatgctgtcccagccgtatttgctggatccctccattaccttggggcagtatgtgcagcctcagggggtgtcggtagtagactttgtgcggtttgaatgtggagaaggtgaagaggcagcagaaactgaataggttccagagacttttggcccaggaggaatatttacttttaagctctggacatcattacaaaaaggaatatttcccaaacctcttcagacccgagaatgcatgggtaaaattattaaatagttgtataataaaaataattttttccttgtttgcg

SEQ ID NO: 729 - DNA, 717 bp, Homo sapiens
  misc_feature (1)..(717): n is g, c, a or t
ttttactgcaaatgactttaatcattaaatagcttctatgccacactctgattaagccgactgaggtccctgggatctgggtcactggaccgagctgctcgctcggtggctccactgccaggtccgggcgcgctccccacagcgctcagttctggcccagacagggcctgacatccgccgcctgcagtcccggggtggccgtcaccgttccacggccagcgcctctgcctgctcgtccgggaaggcgatgtcgaagatctcccggtagtgttccacgaagtgcacctccaggccctcggtgatgaaggctgccaggtcgtagaagtccttcttgttctcggctggcaggacgatgcacgtcacccctgcgcgcttggccgcaatggtcttctccttgatgccaccaacaggcaggatcttgcccgtgagggagacttcgccagtcatggccagattctgccggacaggcctgcccatggccagngacagcagggccgtgacgatggtgcagcctgcgcttgggccgtccttggnggtggcgccctcgggcacatgcaggtggatgtgtgaggtcaccaggtagtcattggcgggggcgtgctgcatgaggaaggctctggcgaaggtgtaagctatgcgggcgctctccntcatcacctcccccagctggcctgtcacctccaggctgccatccttgtcacccttccatccttgtcc

SEQ ID NO: 730 - DNA, 444 bp, Homo sapiens
  misc_feature (1)..(444): n is g, c, a or t
tttattaatgaactgtgacaggaagcccaaggcagtgttcctcaccaataacttcagagaagtcagttggagaaaatgaagaaaaaggctggctgaaaatcactataaccatcagttactggtttcagttgacaaaatatataatggtttactgctgtcattgtccatgcctacagataatttattttgtatttttgaataaaaaacatttgtacattcctgatactgggtacaagagccatgtaccagtgtactgctttcaacttaaatcactgagggcatttttactactattctgttaaaatcagggattttagtgcttgccaccaccagntgaggaagttaaggcaggcctttctgtgggagagtgaggattattgtgtacaagtaggggagtatcccattatgtggacaccnttgtgttattaaaatttgtttaangtt

SEQ ID NO: 731 - DNA, 475 bp, Homo sapiens
  misc_feature (1)..(475): n is g, c, a or t
aaacaaatttttattacacaaaggttgtcacataattggatacttctctactttgtacacaattattctcactctccacagaaaggctgcttaacttctcatctggtggtggcaagcactaaaatcctgattttaacagaatagtagtaaaaatgcctcagtgatttaagttgaaagcagtacactggtacatggctcttgtacccagtatcaggaatgtacaaatgttttttattcaaaaatacaaaataaattatctgtaggcatggacaatgacagcagtaaaccattatatattttgtcaactgaaaccaggtaactgatgggttataggtgattttcagccagcctttttcttcattttctccnactgacttctctggaggttattgggtgaggggacactgccttggggtttcctgtcacagttccatttaataacctcgtgnccgattcttgggctcgggggcccaan

SEQ ID NO: 732 - DNA, 504 bp, Homo sapiens
gaaacacccaaatgtcttcattttaaaagtagtttagagatagcatcaggtaggccaaacaactgtactgggcccctgtagagattagggtttggtctattaaaaaaaatctttgcttgctggaactgcaagcttggcttccctgcaagctcaataggttctggagctcatttaccatgtcgctcgctggatcccagaaagttgcccatggtcagctaagtgacggaagactatacgactaagcctccagcgccgcttcacaccacgcggacgggacgtcataacacaccgatttctgattctaacaggacagctatcccgggggagggcagcaatttcttcatcagccacatcctgaagaatttttggcaaaatggtattcttcctgagtgaattaatacgtagcctctcatctgcgtattcataggccatttttcgtctcttcacatcgcgccacattctccagtctacatagtgacttcgaacttggcctgaagctgatga

SEQ ID NO: 733 - DNA, 539 bp, Homo sapiens
ttttttttagaatattgtgaactttatactgttagaatcactgtccattaaatgatcactagctaatggtcactaaatttacaaattaaggaaattatatatagaatactgcaaaaacacagtaaaaagactgaagttcgcccatttctgctcaggaagtctcttcactcctaagcttcatatgttgtccttctggcttcaaaatttctgctattattactgtttttcctccttttgatcttccttttgttccccagtgccagaacttccagagccttctcgctcagatgccatctttttgtatgccatttcgaacagcttcaatgatgcctgctgaagagaggatgctgcctgtctaatattttctcctgtttcgctgtcttttctagccaggagctccctcattttggaaatctcttctttcagcttgttgcactcatcagcaggtaattggtcattgaattcttccacttggtttctgtgtcgtgaatgattccttcagccatattaactgcttcaactcgttccttctttcgcca

SEQ ID NO: 734 - DNA, 523 bp, Homo sapiens
gtttttctaactgtcccttttggactctgcagccagccacaggaacttttttcttcccttctgttacagagaaggtagctagtatagatgcctcacctactgggtgctcttccacagcacagggtaatctgctgctcagttcctcttgcaaatcttcaacaagacggtaaattattttgtgaagtttaatttttactcctttttttgcagctgactgttggataacattgcctgcattcacattaaagccatatataacaccatcaaatgtttcagcaaggttaacatcatttgcacttatatcacccactccaaaatgtactaattctagttcacactcgtgtgaagcatcataggtatctataatgttcaaaatggcctcaacagaaccatcaacatcacctttaataatcacagaaagtacatttgaatctctttcccttttctcttttggctttaagggtatttgttcttttctttctaaaaaccgtagaattgatctcttcttccacagtagatgggc

SEQ ID NO: 735 - DNA, 474 bp, Homo sapiens
tgtgaggatgcaagttgtgctattttagcattagactatagaattttgggggtggggataagatttttaaatcatttcaattatacaagctctcaaattaaaattttacatgtttcttgaaacttataaaagtagtagtttcatacatgagttaagctaatttcctaatgcaggacaacacaaaggctttaatctagcagttattgatgtctatttcattaaataatacgtttttcccctataaagccaagggcacgtgaagttgttgactggaggaaatatgaacaagaacaggagaaaggtcaggaggatctgaaaataatagaagaaaagcgaaaggaacacaaagaagcacatcagaaagcccgtgagaagtatggccatctactgtggaagaagagatcaattctacggtttttagaaagaagagaacaaatacccttaaagccaaaagagaaaagggaaagagattca

SEQ ID NO: 736 - DNA, 462 bp, Homo sapiens
  misc_feature (1)..(462): n is g, c, a or t
tttttctcttttcaatgatgcatgcttattttctacttgatgagttggattgtactttacaggaaacctaaaataaattcttaggtcaggaaatgtgacttccattaattacaaaacatatatttatgtgtaatgtgttcttaaagctgtaatttacaaatattcataatgattcccaagcttcagtctgcctcttgatataggtccatttcatttatataatcataaataataataagttagtatttattttgctgatttaaggtgttcatccaaaagttcagcaatggcttcttcatctgctgattgaagcagtctctgaattagctgatccaggcccttcccaccacataaaaattccttaatatcacgaacttcatatgctatcctgtggtcactgactctatcctgggtgaaattatatgtccgaattcgctctgactgggctcttgntcccacctg

SEQ ID NO: 737 - DNA, 761 bp, Homo sapiens
  misc_feature (1)..(761): n is g, c, a or t
ttttatgttgagagtctctttaatttttagagtaaatatgacacaatggatagctttagaacaagctaacattactacagttcaagcatgtgcaactggtacagttcagtagtacataaacgactcaaacaaatgtacgacaggtcagaaacttaagttacaaaatagagtcaatattacaattaacacagagaagtaaaaaccattgctctcagattctgcacacttaaaaaaacataaactttatacagtaattgaaattacgcatttctactcagattattagagcatattacaaacacacagaagcctaaacagttatggtcacattttggtttttgttccagtggtgcacgatcacatgaaatgttacatccgttttgtgtgaaataaacatttggctngaagtgcaatagctgctgcattaaaaatatttccataaaaatgcttagattaaaatcttcctgaacattagggttctaaatgttcaggaattattttaaagaagtccttatgaaagaggtcctttaaaaattatagaaatagaggtagttagggaaatttcagcgggggttttggcctggtttttttttttttttttaaacaagggagtaaaacaaaataactcctttggggcccggctttcgtgcccgaaattcttgggccctcgaaggggccaaaatttccctattagtgagagcgggtattaaaaaattcgcaaatccatggtcataccctggttttcttgtgtgcaaaaattg

SEQ ID NO: 738 - DNA, 607 bp, Homo sapiens
  misc_feature (1)..(622): n is g, c, a or t
atgtgtaatgtgttcttaaagctgtaatttacaaatattcataatgatttccaagcttcagtctgcctcttgatataggtccatttcatttatataatcataaataataataagttagtatttattttgctgatttaaggtgttcatccaaaagttcagcaatggcttcttcatctgctgattgaagcagtctctgaattagctgatccaggcccttcccaccacataaaaattccttaatatcacgaacttcatatgctatcctgtggtcactgactctatcctgggtgaaattatatgtccgaattcgctctgactgggctcttgttcccacctgcagttttctagcactttgttgctgacgcttgtctttctcaataatctgctggtagagtctagctctcaacacacgaaaggctatttctttattttttatctgtgatctttcttgttggcattctactactagccctgtggggatgtggacaagtctgacggcactatcagttntattaacatgctgccctcctgctcctttggatcgaaatgtatctattcgcaaatccttggggtccaatttcacatncacctcatctggcttgagaag

SEQ ID NO: 739 - DNA, 499 bp, Homo sapiens
  misc_feature (1)..(500): n is g, c, a or t
tttttttttagaaactgatgtttattttccatcaaccatttttccatgctgcttaagagcctatgcaagaacagcttaagaccagtcagtggttgctcctacccattcagtggcctgagcagtgggagctgcagaccagtcttccgtggcaggctgagcgctccagtcttcagtagggaattgctgaataggcacagagggcacctgtacaccttcagaccagtctgcaacctcaggctgagtagcagtgaactcaggagcggganaggtccattcaccctgaaattcctccttggtcactgccttctcagcagcagcctgctcttctttttcaatctcttcaggatctctgtagaagtacagatcaggcatgacctcccatgggtgttcacgggaaatggtgccacgcatgcgcagaacttcccgagccagcatccaccacatcaaacccactgagtgaagctcccttgttgttgcatgggatggcaatgtccacata

SEQ ID NO: 740 - DNA, 750 bp, Homo sapiens
  misc_feature (1)..(750): n is g, c, a or t
ttgttctggattcccgtcgtaacttaaagggaaattttcacaatgtccggagcccttgatgtcctgcaaatgaaggaggaggatgtccttaagttccttgcagcaggaacccacttaggtggcaccaatcttgacttccagatggaacagtacatctataaaaggaaaagtgatggcatctatatcataaatctcaagaggacctgggagaagcttctgctggcagctcgtgcaattgttgccattgaaaaccctgctgatgtcagtgttatatcctccaggaatactggccagagggctgtgctgaagtttgctgctgccactggagccactccaattgctggccgcttcactcctggaaccttcactaaccagatccaggcagccttccgggagccacggcttcttgtggttactgaccccagggctgaccaccagcctctcacggaggcatcttatgttaacctacctaccattgcgctgtgtaacacagattctcctctgcgctatgtggacattgccatcccatgcaacaacaagggagctcactcagtgggtttgatgtggtggatgctggctcgggaagttctgcgcatggtgggcaccatttcccgtgaacacccatgggaggtcatgcctgatctgtacttctacagagattctgagagattgaaaaggagagcaggctgctgctgaaaaggcatgaccaggaggaatttcaggttaatgactgctnccgntctgagttca

SEQ ID NO: 741 - DNA, 535 bp, Homo sapiens
  misc_feature (1)..(535): n is g, c, a or t
tggaaatgtcagtgtttattaaacatttaaggacatttggaggtttgagaagaaatatacagaatgtagaaaaatcctaagaatcccctgtggctgcagtgcagcctcttcctcccccccgcccccccatttcccatttgtttttcctgctttttgtttggttgtttaaaaaccatttcttaaggctcatttgccccctcccccactccctgacctatgaggatccattctctctctctgtctctctcctcaagacctggagtcccagaacagtgctccaaagtggtcagggggaaccaatgctatactgaagtgtgaggatcaggggcccctctacttgngctggctcttcattaaggacttaagggggggcgtgaattgcaaaagccacatgacgtcattagtcctcagtcatgggtgtaagggcagaggatgagcacaggtaaacaaacaaagaatggattaaaaaataaaaaataataacctaaataaaccctgagggagagtctgatcctgggtgctctggggtattagc

SEQ ID NO: 742 - DNA, 402 bp, Homo sapiens
  misc_feature (1)..(402): n is g, c, a or t
gtttaagacagggaagcttcaatttgtacccccttccttcctatttgaagcttccctntcttaaacttagacttgagaggagagagtttacctgctcttaattttttaatctttgtggcttgctgaaacgtagcagaaggtgtccttttnatttttttcaggctatcttctttgtttccctttggtaactctgaaatgtcctttccatgtgttattttgatttttactccagggaaggtgggaggtcttcctctcttcttttctatacttttagaatctttcttcttgatcttatctccagatttggtctctgatttatttagctgaatttcggtcagagccacttctaggtctcccacgaggttttcgaggactagttttaactgaaggagaccttgtggg

SEQ ID NO: 743 - DNA, 443 bp, Homo sapiens
  misc_feature (1)..(443): n is g, c, a or t
gnaccgccnctacagcagcctcctcgtcgtccgcctcgtcttcgtcttcgtcatcgtcctcagcctcttcagggccggccctgcttccgggtgggcccggcatctcgacgcggcgctgcaggtctcggccgccatcnacncaatctgcgccggttccgggccgtgtttggggagagcggcgggggaggcggcaggacgaggatgagcaattcttaggttttggctcagatgaagaagtcagagtgcgaagtcccacaaggtctccttcagttaaaactagtcctcgaaaacctcgtgggagacctagaagtggctctgaccgaaattcagctaaataaatcagagaccaaatctggagataagatcaagaagaaagattctaaaagtatagaaaagaagagaggaagacctcccaccttccctggagtaaaaatcaaaataan

SEQ ID NO: 744 - DNA, 500 bp, Homo sapiens
ttatttttttttttttttttttttttttttttggcccagagagcaagtttatttggtgaatgctgacggcaaacatcatccaagagagacaagatgggaaagttgctgagacaagaaagcctagggaaactttaggctagatacaaaattcacacagggaaaggcacggactctggggagactgggaaggtcctcagccattcagcaccatgcggacgagctccgccccatgggcccgtcaccccgacagggtatgcctcacaaacgcttcatagttgatacaaccattgctgtcctcatgccctgccaccagcatctctacttcttcctctgtcatcttctcacccagtgtgacaagaacatgccggatttcagcacccatgacggtgccatttccttccttgtcaacaaccgaagttccttcgacataaatcccataggtgccctgggtcctggttcttggccattgtcttgcagcttggccagaagttgccaaagtc

SEQ ID NO: 745 - DNA, 456 bp, Homo sapiens
tcacacacacacacacacccactggggtgcacccaaaggtggcctcacgtgggagtcagagctgttaagatgtgtgacttcaccgaagaccagaccgcagagttcaaggaggccttccagctgtttgaccgaacaggtgatggcaagatcctgtacagccagtgtggggatgtgatgagggccctgggcagataccctaccaacgccgaggtgctcaaggtcctggggaaccccaagagtgatgagatgaatgtgaaggtgctggactttgagcactttctgcccatgctgcagacagtggccaagaacaaggaccagggcacctatgaggattatgtcgaaggacttcgggtgtttgacaaggaaggaaatggcaccgtcatgggtgctgaaatccggcatgttcttgtcacactgggtgagaagatgacagaggaagaagtagagatgctggtg

SEQ ID NO: 746 - DNA, 450 bp, Homo sapiens
tatttttgtttttcaaaaataggttttaagatacaccaaagaaactatacaatacaaaagtttaacaatgaagttaaagtatatagcaaaagccaaatatgacaacacacatgtataatgtagaaaagaatcctttcagtcctagaaaactaaaaaggggagaacttactgaagggtaacatacataaaatgagtactaatagcaaggaataatcctaaacattttcccaataaactgactaagcctcaaaaggacagcttaggaaaatgattaacatgcagtttttcttttttcctagccaattcagttctacttagataaatctggttgccaatcaatacatatataaattaatttttttctgctcaattactaccattttttctttttcaccttttccctaattttctctagcaacacttttcctttggtttgatcagttgaactca

SEQ ID NO: 747 - DNA, 450 bp, Homo sapiens
agccaggagcagccattaacctagtgattaatatgggagacattaccatatggaggatggatgcttcactttgtcaagcacctcagttacacattcgccttttctaggattgcatttcccaagtgctattgcaataacagttgatactcattttaggtaccaaaccttttgagttcaactgatcaaaccaaaggaaaagtgttgctagagaaaattagggaaaaggtgaaaaagaaaaaatggtagtaattgagcagaaaaaaattaatttatatatgtattgattggcaaccagatttatctaagtagaactgaattggctaggaaaaaagaaaaactgcatgttaatcattttcctaagctgtccttttgaggcttagtcagtttattgggaaaatgtttaggattattccttgctattagtactcattttatgtatgttacccttca

SEQ ID NO: 748 - DNA, 328 bp, Homo sapiens
agcgctcgcccggcagccaggggtgcagggacttcattgagaaacgctacgtggagctgaagaaggcgaatcccgacctacccatcctaatccgcgaatgtccgatgtgcagcccaagctctgggcccgctacgcatttggccaagagacgaatgtccctttgaacaacttcagtgctgatcaggtaaccagagccctggagaacgttctaagtggtaaagcctgaagcctccactgaggattaagagcaacagccccagagcctgggctctgctggacttagtataatgtgaaaaaaatgtgttctcctattcctcataaagcttgt

SEQ ID NO: 749 - DNA, 357 bp, Homo sapiens
tattttacagcacaagctttatgaggaataggagaacacatttttttcacattatactaagtccagcagagccaggctctggggctgttgctcttaatcctcagtggaggcttcaggctttaccacttagaacgttctccagggctctggttacctgatcagcactgaagttgttcaaagggacattcgtctcttggccaaatgcgtacgggcccagagcttgggctgcacatcggagcattcgcgtattaggatgggtaggtcgggattcgccttcttcagctccacgtagcgtttctcaatgaagtccctgacgccctggctgccgggcgagcgctgacataagtggatgcgaat

SEQ ID NO: 750 - DNA, 370 bp, Homo sapiens
agcgctcgcccggcagccagggcgtcagggacttcattgagaaacgctacgtggagctgaagaaggcgaatcccgacctacccatcctaatccgcgaatgctccgatgtgcagcccaagctctgggcccgctacgcctccagggtgcagaatagttaaagacacctccctctctctcttcagcatttggccaagagacgaatgtccctttgaacaacttcagtgctgatcaggtaaccagagccctggagaacgttctaagtggtaaagcctgaagcctccactgaggattaagagcaacagccccagagcctgggctctgctggacttagtataatgtgaaaaaaatgtgttctcctattcctcataaa

SEQ ID NO: 751 - DNA, 126 bp, Homo sapiens
ttaggaaggcgaaaacacatgtaattttatttttgtttaaccttaagcttgccaacttctttccctgaacagcatttgtcttgttttgatacccacctacacttatattagaaacgtactgcaaac

SEQ ID NO: 752 - DNA, 410 bp, Homo sapiens
ttttttttcaacctgaaatgttttaatagtggaactgtgtacaggatcctctaaagagaccgcctggctgggtgctcaaaccacatgggccgacccaaaagacgccaaaaccaagagctgctcaggaggcactaaatgttgacggtcttggccggcttcacatcctcaatttcagcagacagccagcggtaagtgcgatgacgccgcagcacctcaatggccttgaattccagtggtgttgcctgaataccaaggtcttctaagccaggcaggtgaggcaatttcatgtctgtgatgtgcatccgctccactttatcccttgttatccagggctcaaatgggcttatttcaaggatcttggtacccatcgatgggcaaaagcggcaaaggggaatggagggaaaaatccg

SEQ ID NO: 753 - DNA, 411 bp, Homo sapiens
aatgattaatagatgatttatttaggcaggaatacatatagtcatcattgccagacttaatatgagaggtgaaatgttcgatccaattttccttcctggataagtttttctttcctatcctgtaaagacagaaaaaaagtacattaaagacaatatattctgccagttggctatattagataaaaataaataaataaaaaaggtaagaaaaactgcattttggcacaacccaccgtacaactgacaaacagaatgaaacactccaaacctaattgcaatcccactgtctaaagcccagggagtgtgcgaagaaacagtaatccgaggaactaaagacacagtaagaaaatgctcctattcaaaaacatcttactcacattttagtcattagaaatatattatcccataaaa

SEQ ID NO: 754 - DNA, 349 bp, Homo sapiens
  misc_feature (1)..(349): n is g, c, a or t
ttaggatggagcaatcctttatttttacacactttgacaaggaggtttgtcgtaaacaacctttccagtggagaacagagaacaggaaaatcagcctccagacatcagcagctgctctgttcagggccgaggctcccccttgccaatgtggtgaggtggaggggtgtactttccttcctttaacagcttaacccgctgnttccnganggnaacnggangtctcaacggttttntgccgangcaaacactctangaaatcatcaaattnaatcttgcactctttctctgnccgagtataaccgattccatgtgnacattctatncaatctttttcaaaagnatggnatcg

SEQ ID NO: 755 - DNA, 286 bp, Homo sapiens
  misc_feature (1)..(287): n is g, c, a or t
tcaanggcacgagcatcgggtagccatgcctttcttggacatccagaaaaggttcggccttaacatagatcgatggttgacaatccagagtggtgaacagccctacaagatggctggtcgatgccatgcttttgaaaaagaatggatagaatgttgcacatggaatccggttatacctcgggcagagaaagagtgcaagatagaatatgatgatttcgtagagtgtttgcttcgggcagaaaacgatgagacgtgcaggtaccaatcaggaagcagccgggntaaa

SEQ ID NO: 756 - DNA, 249 bp, Homo sapiens
tgaagttattgagattctacattgcattgactgggattccagtagcaattttcataactctggtgaatgtattcattggtcaagctgaactagcagaaattccagaaggctatgtcccagaacactgggaatattataagcatcccatatcaagatggattgcccgtaatttctatgatagtcctgaaaagatatatgaaagaacaatggccgtccttcagattgaagctgaaaaggctgaattaccgg

SEQ ID NO: 757 - DNA, 204 bp, Homo sapiens
  misc_feature (1)..(204): n is g, c, a or t
taaactttaanantngtttactgagaatctgtttattaaggagttaacattttagagttggttcaatactttatggaacttaaaatcctgagttgcccctcaataatacagacatctacagtacaggcatttgtacaaaatactataattactggtgcttaacattattagacttctataacttccatttgtcaggtaanttga

SEQ ID NO: 758 - DNA, 455 bp, Homo sapiens
  misc_feature (1)..(455): n is g, c, a or t
cagtttacaatcttaggtgtggtccctgatgcagagaaagcagagttcaatctaggtggtctgactgcagccaatcagaattctccttctgaaacatgtttctgtagagtgaaatttttaaatccctttgacaagttggacaagctcatgcatagcacacaacttgaaaactcttctggcgtaaaaacattctcgagttaataatgttaccccttataacagaaaggaagtcctgtcctgtgagcatatacataaggaggttttaaagtgatttgaaaagtttggaatcacgggnaaatatttaagtggtaggantagaaaattgttcctgnctaatctagtaatggtangtaatngtccctngggtccgtgtggcttttttntaagggtgccctccgaggtcttttaattgggtaaaaagatttggtattangccgggatncaagttgaatcta

SEQ ID NO: 759 - DNA, 187 bp, Homo sapiens
  misc_feature (1)..(199): n is g, c, a or t
tttagcatgtccactttttacttattcgttaaattactcagtctcaaattgtacaatgcttgaaaacagatatgacaatttctgagattaaactttattaaagttacttttccagaaaattcagtaaatatggtaatataggaacaaacttaggctcataagcttttaacnttttacatantcttta

SEQ ID NO: 760 - DNA, 265 bp, Homo sapiens
gaggggcctgaaggcttttatttgactggtccatagggtggggggtgcacccctacagggccaccttggggtccacttccccgggtccctggcctttgcaagctctgccgccttcttctcccgccgcttcttccgctggagcagcctccgctcccgctcaaactccttcatgcgcatcacatagtcgcggtgctcgcagtagtcccagtcgtgccgctcctgcttgcaggccaggaagttggggaagctgtcacgcttgcacttg

SEQ ID NO: 761 - DNA, 335 bp, Homo sapiens
  misc_feature (1)..(335): n is g, c, a or t
attcggcacgaaggggactactgcgcccaccacctcatccggctgctcaagtgcaagcgtgacagcttccccaacttcctggcctgcaagcaggagcggcacgactgggactactgcgagcaccgcgactatgtgatgcgcatgaaggagtttgagcgggacgtanggctgctccagcggaagaagcggcgggagaagaaggcggcagagttggccaaagcacgggacccggggaagtggaccccaaggtggccctgtagggggtgcaccccaccctatggaccagtcaaataaaagccttcaggccctcaaaaaaaaaaaaaaaaaaaaaaacc

SEQ ID NO: 762 - DNA, 451 bp, Homo sapiens
tttttatttttatttctttttatttaatgatgcaaaatacaaatgctggcttgatatatattcacatataactttttctctcacatttacaactcaacagatggtgaatccagaggaacagctacaatcactatacggagcatactacattagtgtttcaaaagtttattccagcccatttcttcttttgtactctaaaatatcttcattgtgttgtttgatgagatagatccacaagaagacagtggtgcccaaggtgaacccaactttcagccagtcaggtttggcattcggcggctctcgcacgtagaactttgatcgcactgaagggccgctcgggagcctggcgggggccagcagccgggaaaggggacgcagcaaggcggacggcgccatcttgcgtggcccagctcagtctctccgagttggcaacagaaccagcgccacctgg

SEQ ID NO: 763 - DNA, 411 bp, Homo sapiens
tcaatttcagtgcgtggtgccctcgaagcgcgccggagtacgggaggctagacagaaggctgaggccgaggtgctagagaaccttgccgtgctggaattcacgttgacgcccccacggagctctgctgcagagcctcgagtcccgcacttccggccgccagtgcgcatggttctgttgccaactcggagagactgagctgggccacgcaagatggcgccgtccgccttgctgcgtcccctttcccggctgctggccccgcagctcccgagcggcccttcagtgcgatcaaagttctacgtgcgagaccgccgaatgccaaacctgactggctgaaagttgggttcacttgggcaccactgtcttcttgtggatctatctcatcaaacaacacaatgaagatattttagagt

SEQ ID NO: 764 - DNA, 588 bp, Homo sapiens
tccttcataggattgcaagtcaagtagctgctttggaccttggctataacctggggtggaagcaattcggaagaaccctcccaaggtgctgtttctcgtgggagcagatggaggttgtatcacacgacaggatttgccaaaggattgtttcattatttatcaaggacatcatggtgatgttggggctcccatagctgatgttattctcccaggagctgcttacacagagaagtctgctacatatgtcaacactgagggtagagctcagcagactaaggtagcagtgacacctcctggcttggcaagagaagactggaaaattataagagcactctctgagattgctggaatgactcttccatatgatactctggatcaagtaaggaacagattggaagaagtctctcctaatcttgttcgatatgatgatattgaaggggctaattacttccagcaagcaaatgagctctcaaagctagtgaaccagcagcttcttgctgacccacttgttccacctcagctaactatgaaagacttctacatgacagattcaattagcagagcttcacagacaatggcccaatgtgt

SEQ ID NO: 765 - DNA, 567 bp, Homo sapiens
ttttttttttaatttaaggatctctttatgttcgtcacaaaggttatcaatgcttttaagagcatctgcatagttttgttatttaacctttacacacaatacatgtttttcaaactgcaaagttgataactaatatcattttcaaataggcatagtataaccttaaatattacatgattcaaattattattatttttttttacaaagaaataaacctgtaaaggatcactgcactacagttgtccattaattatctgcggcaaaactgggatcctagtagaagcttcagcatatggatggttcctctactgcctgggcaccctctgtgacagctttgacacatttggccattgtctgtgaggctctgctaattgaatctgtcatgtagaagtcttttatagttagctgaggtggaacaagtgggtcagcaagaagctgctggttcactagctttgagagctcatttgcttgctggaagttattagccccttcaatatcatcatatcgaacaagattagggagacttcttccatctggtcctacttgatcagaggatctatggagagt

SEQ ID NO: 766 - DNA, 523 bp, Homo sapiens
ttttaagtctaagtaggaatttatttacacggacactcaatcatagataaggcgctgtctaggatccacatgcgttccctggagctacttggcatcaggcttcttgtctccggcttcaagcttgagactctccgggggttggcgatagactgggaaagcctcccaggggctgttcaggtcaaatttgcggaactcttgggccaactccaccggctctgcaccacccgcttcacttcatcatcataacgtaactcaacatagccagatagaggaaagtctttccggaaaggatgtccctcgaagccataatctgtcaggatccttcttagatcagggttggtaagcaaggaagactccaaaatggtcccagatctccctttaatacaagttggctgccttgaaaacagggacagcggcttacatgggcgtcaccaatcctggtggaggttttcaaagggatccctgagttaaaccgcagagacaacaggttgtagaaattcccaaaaggttttcgccgattggg

SEQ ID NO: 767 - DNA, 395 bp, Homo sapiens
  misc_feature (1)..(400): n is g, c, a or t
gcagcaagatggcggcggtctcaatgtcagtggtactgaggcagacgttgtggcggagaagggcagtggctgtagctgccctttccgtttccagggttccgaccaggtcgttgaggacttccacatggagattggcacaggaccagactcaagacacacaactcataacagttgatgaaaaattggatatcactactttaactggcgttccagaagagcatataaaaactagaaaagtcaggatctttgttcctgctcgcaataacatgcagtctggagtaaacaacacaaagaaatggaagatggagtttgantaccagggagcgatgggaaaatcctttgatgggttnggcatcaaccggcttgatcccctttttccnacatgggttctaaac

SEQ ID NO: 768 - DNA, 393 bp, Homo sapiens
  misc_feature (1)..(399): n is g, c, a or t
gtagtttaaaggtccaatttattaggagattaagagatgtatttattatacatggactataaatactgcatagctgactttattcacagtcaagcagagatatagtcagtgccaacctattttgtggatactcttgttcttttgttccaagaaaagtttgcaccataagacttggacttgggttttggaaccttcctctcttcaatgtcatagctccatccatttttttctgcaaaggaaactgcatcttctttaagtactgaaggttangaaccatgttggataagggatcagccgttgatgcccaacccatcaaaggattttcccaacgctcccnggggatcaaaantccancttccanattctttggtggtggttttactcccngactng

SEQ ID NO: 769 - DNA, 209 bp, Homo sapiens
  misc_feature (1)..(210): n is g, c, a or t
tcgtggggtcggagtggttttattgggcagcaggggctngggccggtggggcgtcaccgatacaagtagtcagcctggatgttggcggctatctcggcctcccacttgtccccgttgttgagcaacttctccttgttgtacagcagctcctcatgggtctccgtggagaactcaaagttggggccctcgacgatggcatccacgggaca

SEQ ID NO: 770 - DNA, 240 bp, Homo sapiens
  misc_feature (1)..(240): n is g, c, a or t
catgaattgtagcatcagccaagctgaatcagatggaaagctgggaggcgctgggaacaggaaagccatctgtgcctctgacagcaatggggtgcgagtagagggcaaagtgacacatgtcagtggagacttgggatccttgcggtgccagtctcagaagaggatggttcttgggcacaccccaccctccatccctttttatgccaccagaatgcgncttgccttnaccaagggcttatt

SEQ ID NO: 771 - DNA, 496 bp, Homo sapiens
tttacgtagattggaagtccatattttatttctctagtgacatatttacagttcaatataaattaatggcctgcttgtacaccaaatccaggtcccttgggtggttcagtcaaagaggtaagacctccagctggctcacaagagaagcgtccactccttggccctggttttgggattttgccagccttgagctcatcaataatttcttcaatatccttagctgtcaaatcctcatagtaattgtcatttatttgaaccattggtgcgttcacacaggcccctaaacattccacttctataagagtgaaaagtttgtcaggtgtagtctccccaacctttattccaagctttttctgaatggcctccagtatgctgtcagagtttcgaagcatgcagggtgtagtagtgcagacctgaatgtgatactttccaactggctttcgattatacattgtataaaaagttgctacttcatatactctcatttggaggtact

SEQ ID NO: 772 - DNA, 524 bp, Homo sapiens
tttaatattagcaaagttttactttttttttttctgctcataaatgactctgaaaaagccaatacgcaagaggctaacacaactgtagtctaaaggcaacgtcgaggtcactgatatgtccctcagacaagaggcactgctcagaatccccctgtgctgggggtgagggaaggaggggacggtttaggacagaggaataaatacatgtggttgtgggagttctgccatcagggatggtggccccagcccaggaccccaaaaccctgaggcggtgcagtgggctgccaaccccccagctcggggttccccaaggctgcctcagtgtttggatgggctggaaggaaatgctgaggttctgggagggccccatggccagccccctcttcccactctagccagaggagagccaagctcccggctggccagggccctggggtagggagcagtgcccccaagagggctttctggtgtcaatgtctcatgcagcgtcaggtggtgaggcctgggcctggccctgaggcggg

SEQ ID NO: 773 - DNA, 566 bp, Homo sapiens
ttttttttttttttattattgttttatatttgaccaaaatattctggtttagatacagatatttacagaaagcacgggaggaaggggaccaagccagagagggacaggtatatgtacagggctgagctgcagagggctacaacttccatataaggtaggtttttttgtggctgttttccattgcatatgaaaatgtccatttctggtgtgtgcagacatggtggccattgcccacccaggtaccagcagcagaagactatctgacttggaaagaatgggggtttacaggagtccaggaggtcctttccgctctcctaagagccagtatgttcgcatctttccttttcccttcatttccacatccccccgaagctctagctggaagcatcctagctcatctagggcatccttggtggtagaggagacatggatcttcagcgcttgaccattagactccattcgagaagcagtgttcactgtgtctccaaaaagacaataacggggcatcttcaggccaacaaccccagcacagactggcccagtatggacccctatggcgtaagctc

SEQ ID NO: 774 - DNA, 726 bp, Homo sapiens
tttttttttttcccatggaaacacttttatttctggaagtcagaagaaaaacaatgtgcacaacctgaatgacacagagcggcagctgcaaaccacaggggctgccgagagctggcctttcacagcagaccactgttttccagtgagaatggtgggccattccaaaacaaagctaaaagggttccaaacatccagaatggaagctgcttcccccaactccattacctatactacaggatggattgctttttgtgagaccccttcttccactgtgcaatttttgcattatttaccctcccccgatcttaaagctatatggcgtccaggagagtgcggctgatgcagcttggccatcactgtgatgcagctggagcagaaggcggcccgttcactttagccaaatcccatttgtctcccacctcggtgttgtacccagggctgtacttgcggcccggcagctctctgaactgatgtaagacacggtcagtctgatgagctccaatggtgacttccgggagaaagataggaatgcttgtgtaattcagcacctcaaacttatcctgaaccagtaatcgcaggtggtataaagtgcgattgtcctgcttgagccagggcctttatcgaacttcaggtattcaatgtcctctaacaccttttttgaatcttgagcttccttgcagaatactgtaaaacctcacatttttcactcatctcagggagaaaggt

SEQ ID NO: 775 - DNA, 480 bp, Homo sapiens
tttgatgagacagaataaagttttatttttatattaagctactttgcctcagtggttgcacagtaaggggtagagggtagatgaggacaagaacaccctgagaaagtattttacagcacaagctttatgaggaataggagaacacatttttttcacattatactaagtccagcagagcccaggctctggggctgttgctcttaatcctcagtggaggcttcaggctttaccacttagaacgttctccagggctctggttacctgatcagcactgaagttgttcaaagggacattcgtctcttggccaaatgcgtacggggcccagagcttgggctgcacatcggagcattcgcggatcagaatgggtaggtcgggattcgccttcttcagctccacgtagcgtttctcaatgaagtccctgacgccctggctgcccggcgagcgctgacataagtggatacgaatctcacgcaggcacag

SEQ ID NO: 776 - DNA, 363 bp, Homo sapiens
gctcgacgcaaaacttttttttttttttttttttggttttcacatttttattgggagccgtgggaggggccgcctctgtcagtggaggtgctcacagtttcttcagccactccaggctggggccctgagggtcctgggggtggctggccacgtcgggcatgttcccatcatcacggacgggcactgggtagttgtagggcgtggcattgttgatcatgacggagtacttgaagtaggggctcaatgggggcagaattacagcgaggcccccgacgatgaaggacacgaccagcactggctccttgtcccaggcattcttgaggaaggcgccgactctcgcagccatctttgtctccgcggtcg

SEQ ID NO: 777 - DNA, 492 bp, Homo sapiens
  misc_feature (1)..(499): n is g, c, a or t
tggcggggagcggcgtccgccaagttacttctaccgccagcaccttcgtgaagcccattttcagtcgggacatgaacgaggccaagcggagggtgcgcgagctctaccgcgcctggtatcgggaggtgccgaacactgtgcaccaattccagctggacatcactgtgaaaatgggacgggataaagtccgagaaatgtttatgaagaatgcccatgtcacagaccccagggtggttgatcttctggtcattaagggaaagatcgaactggaagaaacaattaaagtatggaagcagcggacacatgttatgcggttcttccatgaaacagaagcgccaaggccaaaggatttcctatccaagttctatgttggccacgatccatgaagtcattcagtggaaagatgcacgttgatactattttagagcacanataaactcactatacaatggtcactntgtgatagaattccattgatgaaccaattntctg

SEQ ID NO: 778 - DNA, 483 bp, Homo sapiens
ttttttttttttttctgtctctatttttttattttttaaagtaaaactagaagtgatacctgagctctacgtatttgtcataaattaggtcacattctccctggaggaaatccaaggaggcaaagtagtcgggtggccgtgagggtgcagtgtcacaggtaaggctggtccgaggacagctcccacctctttatgggaggagctggagtcaccgccttcttctcagtggcagctacagcagagctctctgctggcttgcctgacaccagcgccttctgcgacgacatgatgatggaagggggcacagattcccggcggccatcgcgagtgcaatagtaattgttggagagcttgtggctaggacccacagggagcttgggaggaggctgagttcgcttggagatctcctggtagcgtactgcagcttccccttcaggtcatgcccggacgccagttccgcagccgctggatgagacgggtggc

SEQ ID NO: 779 - DNA, 449 bp, Homo sapiens
  misc_feature (1)..(449): n is g, c, a or t
cctttaaaaantaacnttggacaggaaatggtatagaataactgccaagtcacataagttaacttttttgttaatgtttgtgatcccggaaagaacacactatcagtcgatgcaaaccgcatgggcgttttcatcagtcgttgtctgagcacatgaccgagtgtgggccacggacccatctttacttgggtccagaaataaaagcggctgccatgtgtggcaggctgcagatctccctcgatctcagggctggggatccggtcttgggcttgagtgataggggattctcccggtaaaggncgatctgtttttcantttgggtgacccttgacagttctcccgggncagggccgcacccagcccagtttnttccagnacacacttgtcaaantttgccngctgttttgcgacagtgacggaataaccnctgggccagtttnatcaattgc

SEQ ID NO: 780 - DNA, 379 bp, Homo sapiens
  misc_feature (1)..(379): n is g, c, a or t
ggggctgcagcgtcatgccggggacagtggagctgcccactctagaggagctgaaagtagangaggtgaaaattagttctgctgtgcttaaagctgcggcccatcactatggagctcaatgtgataagcccaacaaggagtttatgctctgccgctgggaagagaaagatccgaggcggtgtttagaggaaggcaaactggtcaacaagtgtgctttggacttctttaggcagataaaacgtcactgtgcagagccttttacagaatattggacttgcattgattatacttggccagcagttatttcgtcactgtcgcaaacagcaggcaaagttttgacgagtgtgtgcttggacaaacttgggcttgggtncggcct

SEQ ID NO: 781 - DNA, 515 bp, Homo sapiens
ggttttatagatttattttcaaagagtaaaacacatacaatttaaatacaagtccatcagaatcactctgtcagagtcagcaagaatgccaaaatgtgtcctcactgccagacattcgtcactatcatctgagtcctctctcagcaaagccaaagggtctgatactttattcatatacatccttcttatctgcaatgtaatctacaatttcttgtggacacattaacttttcagcatctatatcaggaatttcaaacccaaattcgtcttccatggccatgataatctccacttggtccaaactgtctaagcccaggtctttcataaaatgagaatttactgaaagcttctctgggtcaatcttgtcatagagtttcaatacgtaaagaacacggtcctggatgccctctaacgtcaaaggaggcatgtcgctatactggcggcacaactgtgtaactctaccaggaacctgcgcgagactaaggccggctgcaaagtcccgagcctcgtctggg

SEQ ID NO: 782 - DNA, 319 bp, Homo sapiens
gttccctgttgcccttggtctcggggtcgctgtaggcgctgaggctgcagctatcatggtgaacttacttcagattgtgcgggaccactgggttcatgttcttgtccctatgggatttgtcattggatgttatttagacagaaagagtgatgaacggctaactgccttccggaacaagagtatgttatttaaaagggaattgcaacccagtgaagaagttacctggaagtaaagactggctagattatcgaatgttcacattttaaagttctgagagaaataaaaacatgaagaatcaaaaaaaaaaaaaaaagttttg

SEQ ID NO: 783 - DNA, 587 bp, Homo sapiens
  misc_feature (1)..(587): n is g, c, a or t
ttcaggttgcagggctttatatttcagcaacagtcatacagagccacacagcaggggcacccacagctgcctcaggaggtggcagcggcggcctcttttgcagcttttctctcttgcagcatcctctgcctctgtttggccaggcacttcctggcagaactgtaggcccccaggtcctgatagcggtcctggtaggccttggccacctgggtgaactgctccacttccttgatacagttctgctggtagttctgtccttccctctgctgacaggctttgagccgatcctgcataatgttgataatttcttggtcgactttgtagtccctcttccactgcatttcggcttcatacatgcacatgatgtcctcctccttgcactcagtgatgtctggcacgcggcggtactgccggtggtagtagtaatacctgttctttgcgtgctgccgctctataaattctctcacgagggtcacgggtcggtccacgatgaggtcgaacgctntcatcatgtagacgatgggattgggcttgcaccgcgtgcggcgcggnggctcaaggtacacatccttgtcccagctgtccgg

SEQ ID NO: 784 - DNA, 481 bp, Homo sapiens
attcttgaccaagccactttaatttgtaactttaatgtgctttatgaagtcgataatccttgaaattctcacctggctcttgtacagagtgaggctgagtctacaccttcagtcttcatcatcaggagggatacctaattcttcatctgtccactgggaaggatcaggatacggaaagtgacccagcacctcttctgagtcatgccaaaagcgccagagaatccagaaccacatgagtccgctgaagaactcgctctggaacacctgggatctggtcagctgggggaactgtctataccggggctcaatgtgcacaccaccaccggcatgacggactccaccatctccagcagtccgtgcgcagccgcttctgaaaaggcggcctccaacgcgagcgaaagacgccagccgagtcagcgcggacatactcgctcccgtcccgcccgcggtccccagccgcctcgcccctgcctacttcgct

SEQ ID NO: 785 - DNA, 562 bp, Homo sapiens
ggcatatatatatattttaattgattaaatcttactaatattctgtaagggataaaccagacaagtaggctacagagaagaaatcttattttggagagttaagaaaccactatgatgcttccaggtattatcttcagtgatgcttcttatctttattcagggactccaggtaatattcagctcctacagctaccacaaatgcagcaaatccccatttgaatcctttaaagaatacatcagaaaaggaaacactctttgcaaagccacccatgtatctccaagcttcattgcggccccatggatcccttagcccttttgcagccagcttcttctggatagtttctaatggtgtcccttctatcttccattgtctataatctggaagttccattttatgatgtccatgctcatgtccatgttcatgggccatgtctgacagcaatctgacctctcaggacactcaactctgcaaccggagccaaccggaaacggaggttgtcacctcgagtttctcacggcaggaaagcggagaagccgcttaacgttccgatactgggttaga

SEQ ID NO: 786 - DNA, 653 bp, Homo sapiens
  misc_feature (1)..(653): n is g, c, a or t
ttttaacacagcactgagttttattagggatttcattaaggttaaatttctaggaatgagggagtcctagttagaggacccaaaagcccacgaagcctcctcagatctcatagtgaaccacccgctctggttctttggagggatcaccgcctcgttccaggtacagattattgtaaggatactgctttggtcccacaggctggtagacagggtacacgtcccccacccagcacatgaatatcatgaaagccaggaaaccgaagagctgcatacacatgacatgccaagaaacaggtgtgggggatgtatccacacggttcctgttgtacatgtctaggtgccagtgcatcggttcaccccagttcaacctcaggcccggctggtcccagctataccatggatctctctcatgctgtgagcggtcagggagcttcgggtagtcgccataccccatgccatcatccgggtaaggttcgtagtcttccacacgcatattatacttcttggcggcggcggcccgttctttctgggtcctaggatagggccccgngaacatgtacttggtcatgtggggagctgccgtgcgcccagcggcatacgttccgggatgccctttgagncactggacttccaagaaccccggccttgccacc

SEQ ID NO: 787 - DNA, 555 bp, Homo sapiens
  misc_feature (1)..(555): n is g, c, a or t
ccatttcactgattttttattagggcaagtgcatgttctgtaacatatttcacttgcaagcatgaaagatgaggtctctctctttctacatgggccgctcccggggtctggtcacaatataccaccacagtgggggcaaatcaccttcctttcgggcagggggcaaagcttcagttaaaggaccaccaggtggcgtttcctcctgcagctgcttaacctctcgttcccagctttccctccgcagtttcttccactgttctctcttggcaaagtaatcaggatacattgccttctcagaaggatgccagtcatctaagcaccattctgggaccttgtagcaatcgtatctctcataggaggtgcccccaggagagtcagggaagatgtatggctgtggatgctgacggtaacagaattctttctcggcctccttcagcagctgggtgggcctcggcaaaaccctttcaaatctaaggtcttcaaaaccgggttctcattaacaaagccaattatcggaaatggctctcttgganggcccagaactccagggggtgg

SEQ ID NO: 788 - DNA, 532 bp, Homo sapiens
  misc_feature (1)..(532): n is g, c, a or t
catggtacgtattttaattacaaggtgtcaacatacagattagcataagcttcaactgtcataagaaacatgttccatcaaattcagaaacagcaggtatcagtgaaactggagcaagcattttgaagacttcaacgtattggatggaatttttcaaaaatttcaccatatgttttcttatcttcttcaggaaaatcctctggatgtaatttcatatatccaaacatttcacggtccctcacagcatacaggtagtcttcacgttttacaagataatatccagcaaaaaaaaaggccgtaatatatagaagctggcgatgcaaaccagccgtcgcgatcggcctccgccggattaggttatcaatcaggccggagcagtagcccaagaagccgatgtagaggagccgcgggtcggtcagcttgggcgggggcaggctccgggcctcatccggcagaaaccgtaagggttctgngttccgccgtgcgatcatggtgacgccgtttccacttgaggcctgntctcagaccacga

SEQ ID NO: 789 - DNA, 693 bp, Homo sapiens
aggcctaggggcgcaagacggctaatttattataatttctccttttttagtacatgcacagaaagcctgacagccaagtgtacatgaacatacacacacacacacacacacacacacacacacacacagaggccaatttccagtgaggaacaggctccacagaagaagctgataggcaggggggatcaaacgctgctcccctgctcaccgatctacttctccaaatacaatatcttgggtacctatgatggcaacgacatctgccaacatgtgtcccttagacatcttgtccaaaccagccagatgagcaaaaccaggagccttgatcttgcatcgataagggcggctgctgccatcagacaccaggtacaccccaaactctcccttgggagcctcaatggcagtatatgtggctcctggaggaacttggtagccctcagtatacaacttaaagtgatgaatcagtgactccatggaagtcttcatctctgctcgcttaggtggagacactttggcatcatcaaccttgatctccccaggaggcatcttgtttagacactgtgcgataattctcagggactggcgcatctcctccacccggcacaggtacctatcatagcagtcccctcgagaaccaacaggaacatcaaactcaacctggtcgtaaacatcatagggctgggtcttccgcag

SEQ ID NO: 790 - DNA, 445 bp, Homo sapiens
aggatggagcaatcctttatttttacacactttgacaaggaggtttgtcgtaaacaacctttccagtggagaacagagaacaggaaaatcagcctccagacatcagcagctgctctgttcagggccgaggctcccccttgccaatgtggtgaggcggaggggtgtactttccttcctttatcagcttatcccgctgcttcctgatggtacctgcacgtctcatcgttttctgccgaagcaaacactctacgaaatcatcatattctatcttgcactctttctctgcccgagtataaccgattccatgtgcacattctatccattctttttcaaaagcatggcatcgaccagccatcttgtagggctgttcaccactctggattgtcaaccatcgatctatgttaaggccgaaccttttctggatgtccaagaaaggcatggctac

SEQ ID NO: 791 - DNA, 442 bp, Homo sapiens
  misc_feature (1)..(442): n is g, c, a or t
tttttttttttaaaaagacatgatctttactggtgcttaaatgaacaaagaggtagctaaaaaaagccaccatttctctcaaatgtcatcaattacataagacctcaaaacacacactgatttgaaaaaaaatccatccgtattataaacagtgaagacagattaatgtcatctatttcatagtagcaggtcttccttgatatttgtaacaggcagaaatatttgattttactcttttgtcaccagagataattgccacatcacttgccaacatgatgaactcattttattaggtcaaatgttgaattccactcaagtgcacttaatataggtactacacattataagttgatcgaaattaaagaggtctccaattaggaaatggggatcttcaaaaatactatttactaattttccaggttgtatgtttccntggggttcc

SEQ ID NO: 792 - DNA, 512 bp, Homo sapiens
  misc_feature (1)..(512): n is g, c, a or t
caaagctcaataccccattgctgatttggtaaagatgctcactgagcaagngcaaaaaagtcaggtttggaattcacccagttgcaggccgaatgcctggntcagcttaatgtgctgctggctgaggctggtgtgccatatgacattgtgttggaaatggatgagatcaaccatgattttccagatactgatttggtccttgtaattggagctaatgacactgttaattcagcagctcaagaagatcccaactctattattgcaggcatgccagtccttgaggtctggaaatcaaagcaggtgattgttatgaagaggtctttgggtgttggctatgctgcagtggacaatccaatcttctacaaacctaacacggccatgcttctaggtgatgccaagaaaacatgtgacgcgctccggggaaaagtttaggagaatcctttcagaagttaattttaagggttcaagctgtttagctaattattgccacctttgcagtttttngggancag

SEQ ID NO: 793 - DNA, 348 bp, Homo sapiens
  misc_feature (1)..(348): n is g, c, a or t
tgattaaagtaaaatgcaattcatgtaaatatctccatcaaggaatcatacagggaagacccaagtggccatggggaacagactgggtgttagttttttaaatacagaggcataaataactgtacacaaggcagttanatacacagtggtgcgatagactcctggtggtcacttgaagtggtgcactcagcagcaagttccatctttcacccacttgccaggcctggcatttaagattttgtctccaagggaccagggaggccccagtttgagagaggaggctccgatcaatccagggtgctacttgttaggaggtcaagtaaagggcttgatggggagcaacgttga

SEQ ID NO: 794 - DNA, 315 bp, Homo sapiens
  misc_feature (1)..(315): n is g, c, a or t
ttttttttgagatgggaagaacttgggtcctccttgctccacccaccctgcatggtgagaatggtggagcaggaaaggcaaaggggacctgatggagtgtctctcctgccagggctccctccttccggctgccacccgatcccagcttgccctgcatcctgggtgggtccagggcactggcattgcccccttccggggtattctgggcaggagcggctgcatgacattgagagcaaagggtgagggctgggtgactaaagggactgcctnaaggggantcacacaatctaggggacagagggggtgggggctggg

SEQ ID NO: 795 - DNA, 389 bp, Homo sapiens
  misc_feature (1)..(389): n is g, c, a or t
cagccctcttcttttgattgacagaccaccctgggcaccccatgctcaatatgaacaccttgtagcatccttaggtcttggacagacctcggtcagctctggcacagtcaagaatccaccttgggcagttcttctttgagtcttagccctaatcccttcgaaaattctattttcctttctcctcaatccagtcaacacctactatgtaccagggcaccagggaagccagaagctcagggcccagcctttgcctttgggtacctgccctccccttgggtcttcatgaggcgtctttttcagctttgtgggactttgtttcctggccctctctttcctattttcctggccttncaggccccacccttttgttccctaggatgtgtggattc

SEQ ID NO: 796 - DNA, 533 bp, Homo sapiens
  misc_feature (1)..(533): n is g, c, a or t
ttttgagctggggtaggcactttagtagttctcctaacatctggcacagtcccttatggtaaatcttcaataataaatacttgatttagagattagactttacaggtaagatactcctgagagaggcaagaggaatctaacattcgactaagaaacaggaagcgggtggcagtaggcctggggtaccgctgctgggaggggccttccagattaaggcggacccaggcccgaggcaacaggcctagagagggaaaagaggcgttttgctccttcctggaggaataatgctgaatccttgcagcctctggacagatgtgagaaggcaccactcaagaggtgaggagcggggctgatcctggtcgggcggacctgagtcgggcagccgctctccgggaactggaagggaaagccaggcggctctcaggggctgttggtgtctgagccgngaggtcgaacgcccagggactgcgcccgcaactgacgctcctgcaagaaaaagtctgggtgcgtatgggcttgtcacntcctgggtg

SEQ ID NO: 797 - DNA, 295 bp, Homo sapiens
tttccggcttccaaaagctttattggcaaatatgctctacaaaagaatgatcaatcctgttgcctctaagtcaatggaatgaagagctgtgtccagggacacaccacgccgtgctgaaggagactgctgttgtgtccacctcttattcatagacccagtcatgagcacaagacttgtagtcaaccagttcttcaggcttaaaccataggctgatttctttttcagcactttttactgaatcactgccatgaatgatgttcctgccaacctgaatgcagaagtccccacgaatggt

SEQ ID NO: 798 - DNA, 329 bp, Homo sapiens
gcttggggagaccaatccagcagattcaaagccaggcaccattcgtggggacttctgcattcaggttggcaggaacatcattcatggcagtgattcagtaaaaagtgctgaaaaagaaatcagcctatggtttaagcctgaagaactggttgactacaagtcttgtgctcatgactgggtctatgaataagaggtggacacaacagcagtctccttcagcacggcgtggtgtgtccctggacacagctcttcattccattgacttagaggcaacaggattgatcattcttttgtagagcatatttgccaataaagcttttggaagccgg

SEQ ID NO: 799 - DNA, 154 bp, Homo sapiens
  misc_feature (1)..(154): n is g, c, a or t
anaaaaactaaagggcccttcaaatgaccataaagcagtacaaatcaccaatcctagctaagtaaccagggcacctgcaaaagcagcacctcggaaacaagagagcctgctgcattcacactcaaagcacccntcatataaaagtatcctngtt

SEQ ID NO: 800 - DNA, 474 bp, Homo sapiens
  misc_feature (1)..(474): n is g, c, a or t
ngtctttctgcaccttcatccttaatatgtcacagtttgtgtgatccagcgtcatttccacctgatggggcaactgtgagcattaaacctgaaccagaagatcgagagcctaactttgcaaccattggtctgcaggacatcactttagatgatgaccaatttatatctgacttggaacaccagccatcaggttcagcagagaaatggcctaaccacagtgtgctctcatgtccagctcctttctggagaatctagaggtgaacgagataattgggagagacatgtcccagatttctgtttcccaaggagcaggggtgagcagggcaggctcccntcccgagtcctggagtccnggggtttagggaagatcttgatggggctcttaacagtggtttacttncagcnttgttgttccaccaccaatttnttcaggcatgtttnttttccttgggacnttgggttttccaactttgg

SEQ ID NO: 801 - DNA, 445 bp, Homo sapiens
ttgaccttaaaaccagagcaacattttaatagtcatgagatcaaggattcctgggaaggagaggagatgggaggctgaggcccgggagctttcaagacattcatctgcctgtggcaaggtcagcacctgggccagcccgaggagcatctcagctggcagaccacgcagtccctggaccttgcaagcacatctctgacccaccccatgctggagcctctttcctcaggtgagtccagcagggagagttctgtgtggccactgggaggcagctttggtgaagggcatggtcacctccgcctgagtttgtcagtagctcaacgcatgaccctggtatgaacaaaaactgggtgactgtgtctggccacgtaccctaccacccactaaactgggtgaattattgtttccacagcgcaccttgatttcatacagataattccattgcggt

SEQ ID NO: 802 - DNA, 309 bp, Homo sapiens
  misc_feature (1)..(309): n is g, c, a or t
ttttaatgttttaccaaaaanataataattttaataaatacagcaaatgctaganatctagctaggttatcatgcaaggtataaccaagacaaactcaaatttataatanaggcaacttgcattcaaaatgaactctacccttatattttattaaaagggcaaacatcatgaattaacccagccgcttacttgaattacaaaagtaacatgattcaatatgaaaatnagaaactgtctacnaatctctgacagtaatanattgcaatatacaatgcatacaggagtcatacagagcaacnaacttctcg

SEQ ID NO: 803 - DNA, 335 bp, Homo sapiens
ggagtatattactaaacttttcaactaccacaaagttcttcctatgaatacaggagtggaggctggagagactgcctgtaaactagctcgtaagtggggctataccgtgaagggcattcagaaatacaaagcaaagattgtttttgcagctgggaacttctggggtaggacgttgtctgctatctccagttccacagacccaaccagttacgatggttttggaccatttatgccgggattcgacatcattccctataatgatgtgcccgcacatggagcagtgacattcaaggatccaaaatgtggcatgcagttcactggtagaaccacattca

SEQ ID NO: 804 - DNA, 550 bp, Homo sapiens
tttgaaatataagctttattttaaatttaaagaagtattgaaaataaacattttttacaaattataatcaagcactcaaaacaatttaggaatgttaaacactaattcttaattcaaaataatgacatccatagaatacaaccctggtgttggccaatatgaagtttacttaatattagtattttatatacacttaaccattaatccttcctaaaattcaataacaatgatttcactttataagatgaagccttttatgcaatacccagagataactttttcaaatatgaaacacttataccagtgaggaaattataaaaacatatatcaattatactgaaggacttgatttagaggctgtctgtatatagatgcatttcaccttaggaagtacacatgcacatcaaaacacttcaactgaatatagatgccattacattatttagttacgttacaaagcaaacggcaggttcataaacgttgttctattatgtatcactgaaaagatatattcaaaaaaaagttttgaagctcatgggagtggatgtgc

SEQ ID NO: 805 - DNA, 588 bp, Homo sapiens
ctggagtgagaatcatagctgagcccggcagatactatgttgcatcagctttcacgcttgcagttaatatcattgccaagaaaattgtattaaaggaacagacgggctctgatgacgaagatgagtcgagtgagcagacctttatgtattatgtgaatgatggcgtctatggatcatttaattgcatactctatgaccacgcacatgtaaagccccttctgcaaaagagacctaaaccagatgagaagtattattcatccagcatatggggaccaacatgtgatggcctcgatcggattgttgagcgctgtgacctgcccgaaatgcatgtgggtgattggatgctctttgaaaacatgggcgcttacactgttgctgctgcctctacgttcaatggcttccagaggccgacgatctactatgtgatgtcagggcctgcgtggcaactcatgcagcaattccagaaccccgacttcccacccgaagtagaggaacaggatgccagcaccctgcctgtgtcttgtgcctgggagagtgggatgaaacgccacagagcagcctgtgcttcggctagtattaatgtgtaga

SEQ ID NO: 806 - DNA, 543 bp, Homo sapiens
tttatttcaagatactttattttaaaaacaggtcacaacactaagcttttggcccattctgccattgtacaagctacaaatgcttgttcagcagctgaggggcactcttgagtagcgtgtctgaagagtgaataaaaatccatataaaacaaatattcaaatagtttccataggaacacagataagtgtgacccatatcctagtcttccatatggctgcatcatggcgaccctactcttacaaagacatttcaaaactagcagtaattaagttacatggtccccccaaatcccttaattcaagctaaacttgcagttaacagctaccagagtgctatctacacattaatactagccgaagcacaggctgctctgtggcgtttcatcccactctcccaggcacaagacacaggcagggtgctggcatcctgttcctctacttcgggtgggaagtcggggttctggaattgctgcatgagttgccacgaggccctgacatcacatagtagatcgtcggcctctggaagccattgaacgtagaggc

SEQ ID NO: 807 - DNA, 460 bp, Homo sapiens
tagtacagaggtttactaactctgtgaatgggaagatcacttggctacccagtgctctcttataaacataagtacaagagtgtttcatgaaatccgtttttaaaatgaacatctctgtgtgccacagttcctaggactggggcaaggacacagtgtcaagtcttgttttgaggatgagtctctgaagagacagaattcctgccagaatgcgcacagaacataagtcagccaagtgtgtcgtgccagggatactttgactttggtttgctgctgctgctagggatattgggagggttatccttccaggttgtaggaaaggggtgtgggtaaaggtctgtcgtaaaggaacccctggtgccagccccaactgattccgcatgcgtggttcacgctctcgcagctgaacgctcattttaagatttttccagccctttttgaagctctcaagaaaccctcccct

SEQ ID NO: 808 - DNA, 765 bp, Homo sapiens
ttgtagtacagaggtttactaactctgtgaatgggaagatcacttggctacccagtgctctcttataaacataagtacaagagtgtttcatgaaatccgtttttaaaatgaacatctctgtgtgccacagttcctaggactggggcaaggacacagtgtcaagtcttgttttgaggatgagtctctgaagagacagaattcctgccagaatgcgcacagaacataagtcagccaagtgtgtcgtgccagggatactttgactttggtttgctgctgctgctgctagggatattgggagggttatcctttccaggttgtaggagagggttgtgggtaaaggtctgtcgtaaaggacccctggctgctagctccaactgattccgcatgcgttgttcacgctctcgcagctgacgcgtcatttcagcatttttccagccttttttgaagctctctaggaagccttcccgtggaggtaatttgtccaggtcatgtacaactcgctgggggattttaagtacagtgcgtactgctgggatccggagacaggatactttgaccagggaaaacaaattggaggagagcccagtcataaacactgccgtggggaaatgcatgggtatgggcaaggttatcaagggccttattctgatgacattttctatccccctgaaggtcagaactttggacacctggctcaacacctagctcaagaacaggccacattggggcagtggcttgcaagggtaaatatgtaaatggatcggg

SEQ ID NO: 809 - DNA, 368 bp, Homo sapiens
  misc_feature (1)..(368): N IS G, C, A OR T
ctagctgtcgncattcccctttgacctcctgctgaaggaggtgcagaagtaccccaatgctgagctggcctggtgcaggaaggagcacaagaaccaaggctactatgactacgtgaagccaagacttcggaccaccatcagccgcgccaagcccgtctggtatgccggccgggacccagcagctgctccagccaccggcaaacaagaagacccacctgacggagctgcagcgnctcctgggacacggccttcgacctgggacgtcttcaagaacttcttcgtagatgctgcctagggttgctttggccactgccttcttncacacccatgactgccccttgnttctcaattaaagaatagtgccttag

SEQ ID NO: 810 - DNA, 311 bp, Homo sapiens
  misc_feature (1)..(311): n is g, c, a or t
aaacatatgttattttcatttaaaaatagtttccaatcttgggcatttaccattgtgtcaaaaaaaaaaaaaaatggaaaaaaaaaactgcngtactcncaatggntagnattttcaatttattcctaagagactatatgctcattcttaaactactaaaccactggaagaaaattagtttccccccaatatatgatatctaatngaacaaatttcngggcttaacattttctggtccatttcatgnaaaacaggctattaaatataggcggaatgtaggagataacaaaatatggcnggcaaaatggtcc

SEQ ID NO: 811 - DNA, 526 bp, Homo sapiens
  misc_feature (1)..(526): n is g, c, a or t
ttttttttttcacggatataacttagtttatgggtcaagccaatgcaatgcaaagttgtttctgttccttttttttttttttaaccaaaataaataaatcagatctgtccctgtgaaggtcagagtgataaatgaggggcagctggcccttgggcaatggcctggcccctcacccccagcccctcctctccctcttctgacctgctttggcacagcaaagaaaacgatgcatcagaaagtctccattgggttaaaggagaaagaaagagtggttggggtggggagggaacagcagataatggacactgcagagactgaagctgccctttctgtgccaggtcaggccaaggctctctcctgccagctgccccgggtcatcctcagttcacgccacggctggggcccaccctagaaacctctgccagccatggctagattccgactccaggctcctctacagattctaaggctcaggctcaagatgaagctatcctagntctaaatacaggagcctgtgccttgctgg

SEQ ID NO: 812 - DNA, 869 bp, Homo sapiens
tttttttttttttttttttttctcagcaaaggattttattgggggtcacctgtggcacaggttaaaggagccgaagtgctgtgtttgtggtgggggggggaccacaaaccccggccctgcccttttgcttacataggcttcccgcctaaaagcgcagccagaacatgccgttacggatccggttgtagtctgggagctgctcaatggggccatatccagccactgctgggcactggtcatagatgtacttggagcaaatctcacgtaccacactggcatccacctccgcaatccggctttcccattcagccagggggatgcggcggccataggtcaggaggctgcgtccgatgtcctcacacacaggagtagtgccatctaaatgagataccagggcatttctgaggatgtttttgccccgggccacctcactctccgtggcactggtacacaggcgcatccactgcccttgcaggacgaacatcatgtcatcgattttcattcggtcacagacaaagtgtgcacccagcaagcccgtctctgcatagcagatgctgaaggtctggaaactctggcatagcttgttggccacagcacctgaagccagtgggctggacaggtgcacgccaccaccataagtgcagtcatagtggccgatgatgggcattgcccacttgcaaggccacaattgtccggggctggccaaaccaggaccctctactgcaaatggccacgtggggcaaaggtagaaacatatcacggggggggaatcttattctaaaaccggttgccacattaatccacactcccaccgtgcagggggcttgagaggactgtttggaggccacacccagcccgttgcccaacag

SEQ ID NO: 813 - DNA, 461 bp, Homo sapiens
  misc_feature (1)..(461): n is g, c, a or t
atntatnttgggcagggcttgatctggaaagaagtttggaaaccctggggagaaattagttaaaaagaagtggaatcttgatgagctgcctaaatttgagaagaatttttatcaagagcaccctgatttggctaggcgcacagcacaagaggtggaaacatacagaagaagcaaggaaattacagttagaggtcacaactgcccgaagccagttctaaatttttatgaagccaatttccctgcaaatgtcatgggatgttattgcaagacagaattttcactgaaccccactgctatttcaaggctcagggggtgggccagtttgctcttagtggggtttgggtatggggttgggagttggccacagacttggatcnttgggggaaacattgtccttatttttgctttccccgcccatttttccccccatncattcnttcaggcctttccncgggggagag

SEQ ID NO: 814 - DNA, 320 bp, Homo sapiens
  misc_feature (1)..(320): n is g, c, a or t
natccacaatcttccttatttggggttcaaagcccatatcaagcattctatctgcttcatcaaggacaaggtaggttgttcttctcagattggtttttccacactctaaaaagtcaatcagtcttccaggtgttgcaatacagatttccacacctctctccaaatcacgtatttgtggtcccttaggagcaccaccgtagatacaagtagacttcaagcgacatgctctacaatattcagcagctacttgctgcacctgttgggccagttcccgagttggtgccagcaccaaacaaataggcccatcgcctctctctagg

SEQ ID NO: 815 - DNA, 511 bp, Homo sapiens
  misc_feature (1)..(511): n is g, c, a or t
gatgctggagctgaaggcagatgtcgtcccaaagacagctgagaacttcagagccctgtgcactggtgagaagggcttcggctacaaaggctccaccttccacagggtgatcccttccttcatgtgccaggcgggcgacttcaccaaccacaatggcacaggcgggaagtccatctacggaagccgctttcctgacgagaactttacactgaagcacgtggggccaggtgtcctgtccatggctaatgctggtcctaacaccaacggctcccagttcttcatctgcaccataaagacagactggttggatggcaagcatgttgtgttcggtcacgtcaaagaggggcatgggacgtcgtgaagaaaataggaatcttttcgggttctaaggagtngggaggacattccaaggaagattgttcatcacagattgttgggccagtttgaggttaattttttnggccagggttgcttggcattggttggcagcttcaaatgttccttgcaaccc

SEQ ID NO: 816 - DNA, 380 bp, Homo sapiens
  misc_feature (1)..(380): n is g, c, a or t
ttttttttttttttttttttttttttttccatagaaaataggatttattttcacatttaaggtgaacacaaatccatgttccagaaatgttttatgcataacacatcatgagtagattgaatttctttaacacacagaaaaatcaaagcctaccaggaaatgcttccctccggagcacaggagcttacaggccacttctnttaggcaacacaggatttcacattgtctagggcacagctcaagtgaggtttnttcccaggttcaactgctcctacccccatgggccctcctcaaaaacgacagncaggcaaaccaacaggtttcacagtaaccnggggggaaagttctcagncgggggaacctttcacaaaagccctgaa

SEQ ID NO: 817 - DNA, 457 bp, Homo sapiens
tttttccatagaaaataggatttattttcacatttaaggtgaacacaaatccatgttccagaaatgttttatgcataacacatcatgagtagattgaatttctttaacacacagaaaaatcaaagcctaccaggaaatgcttccctccggagcacaggagcttacaggccacttctgttagcaacacaggaattcacattgtctaggcacagctcaagtgaggtttgttcccaggttcaactgctcctacccccatgggccctcctcaaaaacgacagcagcaaaccaacaggcttcacagtaaccaggaggaaagatctcagcgggggaaccttcacaaaagccctgagttgtgtttcaaaagccaagctctggggtctgtggcctgtgtcaccaactcaggtcacaccacagcacggggaagttagtgttgcagtttcacttctagtcaatcttg

SEQ ID NO: 818 - DNA, 497 bp, Homo sapiens
gagaacttcagagccctgtgcactggtgagaagagcttcaggctacaaaggctcaaccttccacaatggcacaggcgggaagtccatctacggaagccgctttcctgacgagaactttacactgaagcacgtggggccaggtgtcctgtccatggctaatgctggtcctaacaccaacggctcccagttcttcatctgcaccataaagacagactggttggatggcaagcatgttgtgttcggtcacgtcaaagagggcatggacgtcgtgaagaaaatagaatctttcggctctaagagtggggaggcatccaagaaagttgtcatcacagactgtggccagtttgagctaaactgtggccagggtgctggcatggtggcagctgcaaatgtccatgcacccaggtggccgcgttgggctgtcagcaaggttactgaaacgatacgtgtgccaatccactgtcacagtgtgccttagaaggctgctagggatgtta

SEQ ID NO: 819 - DNA, 360 bp, Homo sapiens
  misc_feature (1)..(360): n is g, c, a or t
tgttttgttttacccagaaataagataactccatctcgccccttccctttcatctgaaagaagatacctccctcccagtccacctcatttagaaaaccaaagtgtgggtagaaaccccaaatgtccaaaagcccttttctggtgggtgacccagtggcatncaacagaaacagccgctgcccgaacctgtgtgaagctttacgcggcacacggacaaaatgcccaaactgggagcccttggcaaaaacacgggttgttgggcatttggcatactttgccctttacaggtnggagttatctttnggtcaacacatcttaaatggaggnaattcaggtnggacaacaaggtttttngaaatg

SEQ ID NO: 820 - DNA, 304 bp, Homo sapiens
  misc_feature (1)..(304): n is g, c, a or t
tactctgatgtttgttttaatgcatcttagtccacacagttggtataaaatcagaaaatgcaaagcaaaaacaaaaggtctggagtcttagcatcagaagggcaccatatatacatctacagttggtggccaatacaagtcattgccagacagtccttggaggcacagaacagcctagacccagccaagctctagggaactcacggtcccaaggagtctagacgcttgttcttgatgctcccgacccgtagggaaaatgtggggagttatgaaggctttattgattttacttcattataggnaa

SEQ ID NO: 821 - DNA, 468 bp, Homo sapiens
ttttaacatttacataatatatttagaatcacatggtttccagtgattagatttcagtcatgcctggaaaggagaagacagtggctaggagcacattccttataaaggatacataaatggtatacttaggatgactaatattaagaatttaaacacggtgcatttttttcctcaaaggaagcaattttagtttctaaagagcatttacttctgacatctcgattcctgatttcagtggctgcagactgtgtacttctgtgccacacttaggacaagtaaagtacacgtcaaataagaaactactcttagcacagaaataacagaaaatatgctcacatcctatggtgtgaggcatggtggggcactctccacatagagcggcttctttgccactggtggctaaatggattgttcaccaatagggtgcacccgtaagagggattacccccttgaggacaggttgggttt

SEQ ID NO: 822 - DNA, 561 bp, Homo sapiens
tccggaagccttggtaatccagattcggctaggaaaagacaagctttccagagaatgtttcagagaaagttacgtggagcgtgggcgtttcgcagacgtcctaagtggtctggaacctaacctgcagtgtctctgagcttctggcaagtatgaggcaaggatttcacagaagaacttggagcaaaaattcccactgtcatagctataggctgtccagtcttgagggagctgcaggagcaggaaaaagataccttcagagaagacatggcttccagaaaagagaatgcgaggagtgcgaacagagtgctgagagtaagccagttggatgcacttgaactaaacaaggccctggaacagctagtttggtcccagtttactcagtgctttcatggatttgaacctgggctgttagctcgctttgagccagaggtgaaagcgtgcttatgggttttcttgtggagattcgccatctactccagaaatgccgcagtcggacagtcagttttgaatattaaggtagcagaatgatttttcccctagcctgggtgtcagccacccagt

SEQ ID NO: 823 - DNA, 383 bp, Homo sapiens
atattttacagttttatttttaaatcatttacacatattcatacaaagaaaaataaatttcaggatggaatcctgggaccatggtagtttaaaaaaaaaatctctctgatcattagctactaaagacaaggcaagaggcttagcagtcatttctgggggttagtgtatctccccatgcaggggacaactgagaagaatccaagctgctccctcatcttccttcgatctagatgggggaaggggattttccaatgctctcccctagaaacatttcaagaagtacagcaaaggcttatggtaacactgaacctatttgctagaaatctggcaagattgcactttctgaaccaattttctataacagttggctcaattcccattca

SEQ ID NO: 824 - DNA, 257 bp, Homo sapiens
tatctccaacatacattttatttagtttaaaattccttaatacaagaaggtgttactccttaaccactgctgcagcctcaccggaccctcctgatgtggatgaagcaggcggggtggctgctggtcggctgtggaggcacctccaggcacagggcctagagggtgagaacactggtgacattaacgccatagctgtggcttgggacagggattgagaggcagctatcagggcacatgggcatcagctttcacaggat

SEQ ID NO: 825 - DNA, 674 bp, Homo sapiens
  misc_feature (1)..(674): n is g, c, a or t
catgaagagttgggtttatttcaacagtaaatctgaaactcttgccttaagcaagagtactacagtaattatatcaggaatagacaatttcctacactgtcaaatatataaaagttccttttgcactttcttcaacactgatcaacaagcagattcagtccacatttgctttgatctaactactgagttaacccaagcttcttcttcagagactctggcatctcgggtggaggagggcgaggaagtctgaagtagaccttcacggagtcatagataaaccactgtagtgcagtcagggtaccaatcatgatgatacgggcaaacagtcccttccatacacctttaaatccaagtctcttgaggaccagagaagcactgctacctttttctttattcaacacagataccacagaatcagcagggtgagaaacaattgcacaaaagactccagctatgtaacctgctacaaatgttacaaccagctgctctggctttgaacattcactgcggggcttaggaacacaaacttgtacagtgcttcacagtacngtcaagcaggcgaacttcatcatggtgtatggtatctgtctcatccagagaggagcaaccccttnagaatgctttaggccttcttcttatacattttgggagctgcatccctccaagtgtggcat

SEQ ID NO: 826 - DNA, 438 bp, Homo sapiens
tcttttattttctgaaagtcctaaaactgatccatttatcaaaagatgattgatgccccagttcacaaaccatatctttttctctttcagcaaatcctggagccccaagaggctgcagcctgagtgaagtggtgacatcagaacctgccctccacacccaacagctggactgcagcctcctgcaaggcctggtggatgtgcctgacctctctctgggacagagtccgttccatgtggcggtacgtgatgcggtacagtggctggtcttgtgcgtctttggatgtacaaacttgtctatgagatcaaccttttccaccaggtctcctccaattgttcggactaagtcatagaaatcattttctgcgtaattctcagagggcaaccagaatgaaatatcattgatcacagccggatatttgctaagaggctgaaacttca

SEQ ID NO: 827 - DNA, 569 bp, Homo sapiens
tcaggagaggtgcccatgcatatgtctacctggtgagtaaggccagtcacatctccagaggccatcagcaccaggcctggggatcgaggcctcctgcagcagagtgtgccacccaaagagctccaggcagtgtggtggagctgctgggcaaatcctaccctcaggacgaccacagcaacctcacccggaaggtcctcaccagagttggcaggaacctgcacaaccagcagcatcaccctctgtggctgatcaaggagagggtgaaggagcacttctacaagcagtatgtgggccgctttgggaccccgttgttctcggtctacgacaacctttctccagtggtcacgacctggcagaactttgacagcctgctcatcccagctgatcaccccagcaggaagaagggggacaactattacctgaatcggactcacatgctgagagcgcacacgtctgcacaccagtgggacttgctgcacgcgggactggatgccttcctggtggtgggtgatgtctacaggcgtgaccagatcgactcccagcactaccctattttccaccagctggag

SEQ ID NO: 828 - DNA, 499 bp, Homo sapiens
gtcttaagttgtggtctgacacacactgctgtggttcccctggatttagtgaaatgccgtatgcaggtggacccccaaaagtacaagggcatatttaacggattctcagttacacttaaagaggatggtgttcgtggtttggctaaaggatgggctccgactttccttggctactccatgcagggactctgcaagtttggcttttatgaagtctttaaagtcttgtatagcaatatgcttggagaggagaatacttatctctggcgcacatcactatatttggctgcctctgccagtgctgaattctttgctgacattgccctggctcctatggaagctgctaaggttcgaattcaaacccagccaggttatgccaacactttgagggatgcagctcccaaaatgtataaggaagaaggcctaaaagcattctacaagggggttgctcctctctggatgagacagataacatacaccatgatgaagttcgcctgctttg

SEQ ID NO: 829 - DNA, 452 bp, Homo sapiens
tttttttttcatgaagagttgggtttatttcaacagtaaatctgaaactcttgccttaagcaagagtactacagtaattatatcaggaatagacaatttcctacactgtcaaatatataaaagttccttttgcactttcttcaacactgatcaacaagcagattcagtccacatttgctttgatctaactactgagttaacccaagcttcttcttcagagactctggcatctcgggtggaggagggcgaggaagtctgaagtagaccttcacggagtcatagataaaccactgtagtgcagtcagggtaccaatcatgatgatacgggcaaacagtcccttccatacacctttaaatccaagtctcttgaggaccagagaagcactgctacctttttctttattcaacacagataccacagaatcagcagggtgagaaacaattgcacaaaa

SEQ ID NO: 830 - DNA, 452 bp, Homo sapiens
  misc_feature (1)..(452): n is g, c, a or t
tttttttccggagaccgatgcaccccacagtcagggtgattttatttctagaaaaggtgacaggtgctgcacgtgggcaggagcaggtcacagtgaggcagggcaggggatccccctctcaacacaacctaggcgccanagcctaccggccaggtagagcaagggtngccatgtagtgagcccagcatggggagacgctgagggcccatgggngccaaagccagggggcagcagctccaaacaccgacagcgccacgtcccctgggcaggaaggtggatgccccagggactctgtcctcctgctggagggcctggcaggttggtctcaagacaccagccgganggaggcctggcaggtggccaggggattagagncagggggattgggcttgancagggacgcagcccccanctggccttgnaggcttcccagacacaacagncccanggcc

SEQ ID NO: 831 - DNA, 445 bp, Homo sapiens
  misc_feature (1)..(445): n is g, c, a or t
cgcaagggacgggtgttcgccaatgccccagactcggcctgcgtgatcggcctgaagaagaaggcggtggcttcagccccgtcactgagctcaagaaagacactgatttcgagcaccgcatgccacgggagcagtggtggctgagctgcgcnactgctgaagatgctggcacaataccgcatcagtatggccgcctacgtgtcaggggagctggagcacgtgacccgccgcaccctgagcatggacaagggcttctgaggccagccatgcccacgcccctccccagcccccacccatgccagcgcagcncacgggctcacgatggggcctgggctgttgtgtctcggagcctgcagnaaggtngggggctgcgtccctgctcagcccatcccctgcctctatccctggccacctgccaggcctccctccggctggtgtcttgaga

SEQ ID NO: 832 - DNA, 451 bp, z
  misc_feature (1)..(451): n is g, c, a or t
ttttttttttcacagtgaccagttggcatttattagtgtagttacaatttgtcactgtagtaaaagtagtagaggaaccaagactctttgttatcacaaagaaataaataaagcttatttttaggaaaattctaactgagtaagtgatatctagcagtagcactagaggtnccagccttgtgtgacagataaagctggggcagaagtcatgttaaattctacctaaaaggagctcccacccactgcctgctcctccagctcctggccagaactggtcatggctgcaaggtacagaataaaaggaaacctaatgaaaaaaacagctaaaacacagaagatgtggacttattagggtgtgagctgaccatgatcaggtaatctattcccctcactccagagaggtttagacggcagcttccccggaccgctttccgggtgatgtgctccaggt

SEQ ID NO: 833 - DNA, 428 bp, Homo sapiens
  misc_feature (1)..(428): n is g, c, a or t
gtnaaaagatgaaaacaactgtgaaaaggggcttggtgttaaggaatgaaaagtgcaatgagaactataccactgacttcattttcaacctgtactctgnngtggggaagggcatcttcgacagcaggaagaatgtgcttggtcacatgcagcagggtgggagcccaaccccatttgataggaattttgccactaagatgggcgccaaggctatgaactggatgtctgggaaaatcaaagagagttaccgtaatgggcggatctttgccaatactccagattcgggctgtgttctggggatgcgtaagagggctctggtcttccaaccagtggctgagctgaaggaccagacagattttgagcatcgaatccccaaggaacagtggtggctgaaactgaggcccatcctcaaaatcctagcccagtat

SEQ ID NO: 834 - DNA, 397 bp, Homo sapiens
  misc_feature (1)..(397): n is g, c, a or t
gaaatacaaaatgttaaatatgcaagctgtactaatgaaggtgctccttgaagttgattaaggagggctgggctgcttgtggcttcctgcaggggagagaaaaaacagaaggtcaagatggttaccccttgctgccttcatcccatccctcatcatgattcttcttgcatcctcttccatgtgctcttgccacttcccttgacttccatctgtgacatcttagtctattcaccaaaatgtgatctttgtaaaacctaatttaaagcatattacttcttttttctaaagcactagaaaggcttccngtctcgctcaggataataatttttaaagggttaccatgtgataacataggaaccacggcgatctgggcttctcacngcttctcccaatttgg

SEQ ID NO: 835 - DNA, 363 bp, Homo sapiens
  misc_feature (1)..(393): n is g, c, a or t
ggattcctccaactctacaattaatcaggcaatcaatcaatcaatcaaggaggtaaggaaaaccgcagcagaatgtgatgatgaaaaaccaaggatagtaattattaaaatagaaacatgctcatgcttccattactatttatattcatttatctctcatagtctttctcttttattcccctttcttacacacacacacacacacacacacacagagagagagagagagagagagacactaagtaggccaaacattggcatcaaacccttaaacaaaacagagtaaacaaagggagctaactctgggaggaaaggcaggcnttttggttcctctggggtgtggggtgttcacaggccaattac

SEQ ID NO: 836 - DNA, 389 bp, Homo sapiens
  misc_feature (1)..(389): n is g, c, a or t
ttttgctagaaacaagacgacctacaataaaaagtaccagtactattccaataaacactgcagagggagcacccctcgttgctgagtcccctcttccctggaaaccttccacccagtgctgaatttccctctctcataccctccctccctaccctaaccaagttccttgggccatgcaggaaagcatccctcacccatcctaggaggccaggcagggagccctntcttattacccacccaggaatggaggacattccaggcaggattttccaggcctttcttacttggttcttncttnccaccttncaattccgtggctttaaaccaaaggangttgttattctggggggggtntttttnttggattnaaaggcantttnggcaanttc

SEQ ID NO: 837 - DNA, 331 bp, Homo sapiens
  misc_feature (1)..(331): n is g, c, a or t
gaccccccagagtacagcttctttgggttaagcacggagttgaggtggaggagagcagtagaaggctggaaatctgctggatgtctcattctgggtgggtatagaagggctcctgcctggcctctaggatgggtgagggatgctttctgcatggccaaggaacttggttagggtagggagggagggtatgagagagggaaattcagcactnggtggaaggtttccagggaagaggggactcagcaacgaggggttgctccctctgcagtgtttattgggaatagtacctggtactttttatttgtagggtcgtcttngtttctagccaaaa

SEQ ID NO: 838 - DNA, 799 bp, Homo sapiens
  misc_feature (1)..(799): n is g, c, a or t
tttgagaatatttgccctttaatttgcatttaaaatcagtttctttaaatactttagttacaagttctgaatagtgaagacagagtagtagatgctgcaggcactcagtattggctcccaccccttcccccctcccccacccccaggcctcacctcttggcttaagatacaaaagggcactctctactggccctggtgtcaaacgtcagcagcctcaggcctggatgcagttggatacaaagccatgaatcccagtggctccaaggaattccaatgattgtgcccagatccacgggcaacacaccttagaaatgacctcatccatttcaccactaggtactaacaccctcagggtggtttcctaccccagtccacgtcctccagatctgtgtcctgcagaggaagagacaaggccccgctataacgcaggaaggaacaaaaactgcctcctcagcccaggtgcttacagcaacttaactgaaaagctcaaggcaatgtgagtcagtctagaggagacctcccttccctagtctctaccaggctctggcccttcctcgggaccacgcttggtcccactgccatgatgtgctagaatctgctctaagacangggtgctagatgaggcccagncaccagcaaaggggttggaagggttgctacagccccagctgtgtgagattgtgccaagacgagtactcatggtgtcagcctatgatggagagcgtgagggcaggcctgcgctactcatctatgatgattacaatgcatganctcaggggacccctggcctctcctacca

SEQ ID NO: 839 - DNA, 423 bp, Homo sapiens
  misc_feature (1)..(423): n is g, c, a or t
tttagcaaaagtccagaactttattaattctccctggtcccgcccccgccccatgggatgcttgcaaggtcaccaggcctcaggtccagggggtccgaagcgccgcagagctgctcctggtcttccaggtccttccgcaccttcttgcgcatgtagaagatggggcagtcccggctggtgcagatgacgtcctcgtgcaggctgccctggcagggctggcactgcgtccagaggcgcgagaagcgtcctccagggcattcagatgggatacctccttctgatacagctcagactcccggggctggcagaactcacacacggctccctggtggctgagcactgtgcggcacgcaatgcagcagttgcggcgtttggcgaaggccaggaggcgcnccaccttgcccgtgagcaccgtcttgcagc

SEQ ID NO: 840 - DNA, 550 bp, Homo sapiens
cctatcgaaggggccccagtccctcccctgtgcatacagctccccagccgggggttcccttggattcataatcctccagctctacccccacccccagtgacccacatcttatccccatgacctctgacctcctgaccccttcctcatccttgcttccccttgtgaactctgacccttccgtggtgacctgagagccctacagactctgtggcccagagactccgtgacctccgaccccatcccagacccaggccccccccatgtcacagcccgcaggaggcctaggcctaagccccaggccccatgaccaccccgtgtccaccccggtgccctttccctggctgcccgggtgtgactgccatgtggccgcagacccgctgttcgtgctggagcacagcctgcccattgacacgcagtactacctggagcagcagctggccaagcccctcctgcggatcttcgagcccatcctgggcgagggccgtgccgaggctgtgctactgcggggggagcacacgcgctgcaagacggtgctcacgggcaaagtggg

SEQ ID NO: 841 - DNA, 515 bp, Homo sapiens
  misc_feature (1)..(515): n is g, c, a or t
ttttgtttaaagataatttattctatagagtgcattcttgcactctataggtgacagaaaaacaaactgtgctttaaataccaaacaagtaaatcagaaagcttattttctatttnnnntatatctaagacacacttntataanaagaaaacagaccctcctaacatgtancattaccgttcgtggcaattgttctcaacctttcactctccttttgaccttngcattaagctcctttgctcacttctgagctctcagttacagttcttgaggtggcatcctaaccaatttgcactatctttcaggtgaagcgctggatatttaccagataattgaactcaccaaaggctccttggaaaaacgaagccagcctgggaccatagcactgcctgggnggctctgtatttgctcccgtggagcttcatcggggggtggtncaggctccccaaactcaaggcntttcaggctggtgncttttttgcaaaaaggggccttgccttaagggccagcccatt

SEQ ID NO: 842 - DNA, 223 bp, Homo sapiens
  misc_feature (1)..(223): n is g, c, a or t
gaaaacagccgggagatgccttgttttgcaagagcttgatgaacttgctcttcagcctgcatgtttcgtataagagtcctgtcattctgctgcgtgacttgtcccaggatatccacgggcatctgggagatatagaccaggatgtagaggtggagaaaacaaaccactttgcaatagtgaattttgagaacggctgcccccactggnctggttacctggtcct

SEQ ID NO: 843 - DNA, 549 bp, Homo sapiens
  misc_feature (1)..(549): n is g, c, a or t
gcccagggcgcccgctcggcgcacggctggattggctcaagatccacctggtcaatctcacggggttgaagaagcgggaccgctgcggaacgcctggcctttgcggaggaggtgatggatgacatcctggactccgcggaccaacccttgacgggccgaaagtggtggatgggcgcggaggaaccctggcagacgctggcctgctgtatggaggtggcgaacctgtggcgcctccgaccctgccgcctatgtctcccacctccccgttccatcaggaagctacttgcaacggcctgcagcattatgctgtnctgggccgcgacagctgggcgccggctccgtcaacctggagccctcggatgtgccgcagaacgtgtacagcggcgtgcgcanggggtggaggtgttccgtagcaggacgcccagcggcaatgcgggtggcacaggtgctggaaggtttcatcacccgccagtggttgaagcagacggtgatgacggtggtgtaccgggtcacgcgctatgggcggcgctgcaagattgagaaacgcct

SEQ ID NO: 844 - DNA, 575 bp, Homo sapiens
  misc_feature (1)..(575): n is g, c, a or t
tttgtgaaaatagactttattataataaaatgtctttttaaacaaattcccccaccattccacacccctggagaccaaggtcaaggtgggggttcagtcaaactatctcccaccacagcaaaggaaacatgcaaagacacactcacccctcagagggtgggggatggagtggatcgggtaacggcggagaacccctaccccactctgaacagggaatgtatgaaaatagctgcataaatctgtccttttctccagcccctggactccaacaggggttagaagaaaactatgcaaaagaacttgaatccaatgagcaaaataaggcaaacccaactccgctttcggccccgctggccccagggtctttgggggcgggaccttacaggggccagcaggccccggcagggaaggatggagcacgacgggggcagggtggggcccactttggcttggcctttctccttcctgggcctgtgcagnggaagcgaggtggaggaagctgaactgangcactgagtatatacatatatacaggctccgccccgctgcccgctggggagatggggcttcaataa

SEQ ID NO: 845 - DNA, 525 bp, Homo sapiens
gctgcaggtgtatgcgccgctgcctggccgcccggacgccttccaccgctgcatcttcctcttctgctgccgcgagctaccgtgctgtgccggcctgcgaggtgagccgccaaacggggtcgggacggggccatgcctccgacgcgtgcgcggcgttaattccgggagcgaccagggggacggcggcaagcaccgctgccgccgcagcctcagagctccctctccgcgctgccccaggagcaccttctcccgggcccttccaggatgtgctcatttttgctacataagcttctaactgtgcccacgcgcattggtaacccccagcttttaatcagtgggtaccaggtatggtgttaattcagataatagaaattgtcttggaaagatggatcccagtagctttttcgtatttttggcagtcgttcttaacgatcagtcttattaatttggattagctcaaaccacctctagggggcaactcattggggtgttccggggggatattgggttgttttgagataaacg

SEQ ID NO: 846 - DNA, 567 bp, Homo sapiens
ttttttttttttttttatctttctagaatttaataaacttagttattctaagttatccaactatttggattcccaggtttcatgattgcaaaaggcaggaatgggatgtgaatgggcagacagtaattcagttcttggtttcttttcctttgatttgtttacaatggaatatttgcatgttttctccaaggacgttgtaccttcttgctggccaagacatccaggtcacagcagattcgggcacgtgtggaagaaggttggatgatgtcatccacaaaccctcgcactgctgcagggaaagggttggcaaacttctcgatgtactctgcctgagcagcttccacattctcatgccctttgaagatgatctccacagcgccctttgctcccatgactgcaatctctgcggtgggccaggcatagttggtatcaccacaaaggtgcttagagctcatggcatcataggcacctccataggccttccttgtgatgactgtgactttgggtacagttgcctcagcacatgcgtagagaagcctggaccatgccggatgatgccccgtattc

SEQ ID NO: 847 - DNA, 392 bp, Homo sapiens
agaaaagttgcaaagattgtactgagggctcctaccagcacccattttatcctattgttaacatcttacgttagttccatacatttgtcacaactaatgaaccaatactgataatataattataagctaaagttcgtactttacttacattttctttgtttttatctaagaatgtcctttctcattcaagatctcatctagattaccccattacatttagtcatccattttacttttaagtaacttttatctaaactaaagcgcttattacccattcattgaattaaatcaagaaacggctccacttgctaatgtttagttagcttatctaggatatataccctaggaaagaatataactgcatttaaaaagatttaccctagactccagaa

SEQ ID NO: 848 - DNA, 452 bp, Homo sapiens
gtacagtgtgacaaggtgaatatcttaaccagacttgccgcagaattgaacaaatttatgctggaaaaagtgactgaggacacaagcagtgttctgcgttccccgatgcccggagtggtggtggccgtctctgtcaagcctggagacgcggtacagagaggtcaagaaatttgtgtgattgaagccatgaaaatgcagaatagtatgacagctgggaaaactggcacggtgaaatctgtgcactgtcaagctggagacacagttggagaaggggatctgctcgtggagctggaatgaaggatttataacctttcagtcatcacccaatttaattagccatttgcatgatgctttcacacacaattgattccagcattatacaggacaacccctgtgcagctacgtttacgtcgtcatttattccacagagtcaagaccaatattctgccaaa

SEQ ID NO: 849 - DNA, 435 bp, Homo sapiens
  misc_feature (1)..(435): n is g, c, a or t
ttttttttttttttttgttttttttctccttgattcaaaaatacaatttattttaaaaacaaaaagagggaatggatgcagaagcccgtctggcnttccgtggagtcgccccttcccaatggcgatggccgctccctgtggcctcagcttcctccgtggaatgaaggggtccaggtgacaccttcctcgaagggtgggcgtgggcctgaggctcccaagtcggccaggggctcggctggctcagaagaggtgcttcacatcaacagtggtacggggtggccgctgggccatgggtagcgtggggtaggggtcgggggaagtcgctgtagggcaggctgaaggggtagaggggtctgtaacgtgagtcctgccagagcagcttgtcctccaggaaggcgacggtgggcagcgtcaggaccagcgtctggtgcttga

SEQ ID NO: 850 - DNA, 440 bp, Homo sapiens
  misc_feature (1)..(440): n is g, c, a or t
ttcatgttgaccaccaggaagggcaatgacatcagcagtggcacagtcctctccgattatgtgggctcggggcctcccaagggcacaggcctccaccgctatgtctggctggtttacgagcaggacaggccgctaaagtgtgacgagcccatccagatcggttgctgaggatgggctcgtcacatgtacgangcaaccgatctggagaccaccgtggcaaattcaaggtggcgtccttccgtaaaaagtatgagctcagggccccggtggctggcacgtgttaccaggccgagtgggatgactatgtgcccaaactgtacgagcagctgtctgggaagtagggggttagcttggggacctgaactgtcctggaggccccaagccatgttccccagttcagtgttgcatgtataatagatttctcctcttcctgcccccct

SEQ ID NO: 851 - DNA, 504 bp, Homo sapiens
taaaccttccttaaagattctttgatgctttgctctatcactgtagacctggtctttttccccccagttttttcttttttacattctgggttgctattttcagattaataatttgatgaccccatcacagtaccaaaataccccccaaaatgaagttcaaatttgatcaaaacataaatcagagtgagtgagtaaaattataaaggccaggcagcaggaaaagtcaccctcaactaccatctgactggtcaggtctcacccatgccaaggggggcaggaagaggagaaatctattatacatgcaacactgaactggggaacatggcttggggcctccaggacagttcaggtccccaagctaaccccctacttcccagacagctgctcgtacagtttgggcacatagtcatcccactcggcctggtaacacgtgccagccaccggggccctgagctcatactttttacggaaggacgccaccttgaatttgccacggtggtctcc

SEQ ID NO: 852 - DNA, 433 bp, Homo sapiens
  misc_feature (1)..(433): n is g, c, a or t
tgtcattgtggncatggacgataccctgttccagttgaagttcacggcgaaagcctggagaagctggccaagaaggcggagaaggactccaaggcggaaggccaaagtgaagaaggcccttctgcagaaaaatgtagagtgtgcccgtgtgtatgccgagaacgccatccgcaagaagaacgaaggtgtgaactggcttcggatggcgtcccgngtagacgcagtggcctccaaggtgcagacagctgtgactatgaagggggtgaccaagaatatggcccaggtgaccaaagccctggacaaggccctgagcaccatggacctgnagaaggtctcctcagtgatggacaggttcgagcagnaggtgcagaacctggacgtccatacatcggtgatggangactccatgagcttggccaccaccctgaccacg

SEQ ID NO: 853 - DNA, 404 bp, Homo sapiens
  misc_feature (1)..(404): n is g, c, a or t
tccagggatccatttgtttatttacaacagcattctaggagaaaggtgaatgggcccctctcctcagtgcccaaggggacaggactgaggcagccccacctggcccatgntctgcagantctgcaccctccccaaggctgttacccacgatggacagaaggacgttctctcaacaccagggttgattttggggaggctggagggaaccacgtctaggacctaccaacactagcccctccctgggggctcccaagttctgaaaagaaaaccaaatgcagtgagcccacgtcagggtctccangttcctgcacgtaacacccacgacaccactgcancctcagcatgggctgcacggggtgggcangactgaggaggggatggcaggactgaagaggggcggggac

SEQ ID NO: 854 - DNA, 393 bp, Homo sapiens
  misc_feature (1)..(393): n is g, c, a or t
ccagggatccatttgtttatttacaacagcattctaggagaaaggtgaatgggcccctctcctcagtgcccaaggggacaggactgaggcagccccacctggcccatggtctgcagantctgcaccctccccaaggctgttacccacgatggacagaaggacgttctctcaacaccagggttgattttggggaggctggagggaaccacgtctaggacctaccaacactagcccctccctgggggctcccaagttctgaaaagaaaaccaaacgcagtntgcccacgtcagggtctccacgttcctgcacgtaacacccacgacaccactgcagcctcagcatgggctgcacggggtgggcaggacttgaggaggggagggcaggactgaaga

SEQ ID NO: 855 - DNA, 377 bp, Homo sapiens
  misc_feature (1)..(377): n is g, c, a or t
tttttttttttttgggtgtagagttatttaattataaagaactattttaggtatagtcaatgattttcaattattatgtcaattacattcgttgtattcacttacggactttatggtaggttacaaaaatatatactttgaaaagaaatatactctttatgcaaaggaagctatgccatcaacaaacttgacctctaattcccaagtttattacagaaaaatttgtagtgtgaaaaagggcaaacatctccagctcatcttctcaggtatctatgaaggattccgtacaaactcctttcaaatttttcccggggaatgctntcgggnactgggaccttgatgaagggaaatactttntgactcatggggantttggt

SEQ ID NO: 856 - DNA, 511 bp, Homo sapiens
  misc_feature (1)..(511): n is g, c, a or t
acctgcctgagtggaccatccgggagtttaagatatgcggtgaggaacagcttgatgcacacagactcatccgccactttcactatacggtgtggccagaccatggagtcccagaaaccacccagtctctgatccagtttgtgagaactgtcagggactacatcaacagaagcccgggtgctgggcccactgtggtgcactgcagtctggtgtgggtaggactggaacctttattgcattggaccgaatcctccagcagttagactccaaagactctgtggacatttatggagcagtgcacgacctaagacttcacagggttcacatggtccagactgagtgtcagtatgtctacctacatcagtgtgtaagagatgtccttcagagcaagaaagctacggagtgaacaagaaaaccccttgtttgccaatctatggaaaatgtggattccagagtttncacagagatccagtctatttcaagggcttgaggatgttacctgaaggagctc

SEQ ID NO: 857 - DNA, 418 bp, Homo sapiens
  misc_feature (1)..(418): n is g, c, a or t
caagctccagcaatttttattttcatgaatgagagttggggatcagctgttaggttctgtgcccaggacactgactgctgcctggcgcccactctctatacagtcattaacagcaactccctcataggaggctccagccagagtcaggggcaacctgtgagcagtcaggaattgcctagctgactctagtttttgccagtgacctagtgtatactggggaatgcagttcttgtgtagatggaccaaagcagtggctcggcatctccttcaagtcctaattgtgtagcagctgcttcctgggccccgcngtttgaaacagctccctggagataagncacagccacttagnctcccagtgtncttgtaaccaggaacctccccagnattcacagtcactctganaggcnagggggggtcc

SEQ ID NO: 858 - DNA, 425 bp, Homo sapiens
  misc_feature (1)..(425): n is g, a, c or t
ntcaagctccagcaatttttatnntcatgaatgagagttggggatcagctgttaggttctgtgcccaggacactgactgctgcctggcgcccactctctatacagtcattaacagcaactccctcataggaggctccagccagagtcaggggcaacctgtgagcagtcaggaattgcctagctgactctagtttttgccagtgacctagtgtatactggggaatgcagttcttgtgtagatggaccaagcagtggctcggcatctccttcagtcctaattgtgtagcagctgcttcctgggcccgctgttgaaacagctcctgagataagacacagccactagcctccagtgtctgtaaccaggaacctcccagcatcacagtcactctgaggccaggggggctcccgtcctgctcagggaaagn

SEQ ID NO: 859 - DNA, 459 bp, Homo sapiens
  misc_feature (1)..(459): n is g, c, a or t
gctgtggtgaatctgcagtaccaaggagcccatctgcctgtccagggatttggacatttggtgccatcttcagaagatccaggagtcctgggaatcgtgtatgactcagttgctttccctgagcaggacgggagcccccctggcctcagagtgactgtgatgctgggaggttcctggttacagacactggaggctagtggctgtgtcttatctcaggagctgtttcaacagcgggcccaggaagcagctgctacacaattaggactgaaggagatgccgagccactgcttggtccatctacacaagaactgcattccccagtatacactaggtcactggcaaaaactagaagtcagctaggcaattcctgactgctcacaggttgcccctgactctggctggagcctcctatgagggagttgctgttaatgactgtatagaagagtggggcgccangca

SEQ ID NO: 860 - DNA, 469 bp, Homo sapiens
  misc_feature (1)..(469): n is g, c, a or t
tttttgatattcaagcatgttcttttattaagcgtaggatgcgaggcacagcaggaggtttaagtacaatgtgaaagcaagagaactgagactgtgattgacagacaaagggattaactaacgttttattctctgccccccaaaatatcctgtgtattcttaagtatatacgcttcccttcctgcctttcaaggtatctaaggaatgatttgaaaaatttgttataatcnctaaagaattttttgtatagcattagcaaaggagtctatgncaagtactttgccacctggtagttctgcgtattctactccctctgggggtcactgncatcctcactggctgggacaaggttccgagatttgtctccccagcagttgctaagctgggctcaatcttgggtcagatgaatgaaaccattatctccnggatcaatgcagccaggagcagtgaacacntgctttttcctccc

SEQ ID NO: 861 - DNA, 272 bp, Homo sapiens
  misc_feature (1)..(272): n is g, c, a or t
aaaggaaataagagcattcacaacagagtgaaaaatcttaagtaccaatgggaagcagggaattcctggggtaaagtatcacttttctggggctgggctaggcataggtctctttgctttctggtggtggcctgtttgaaagtaaaaacctggttggcgtgtaggttccgtatctccctggagaagcaccagcaattctctttcntttactgntatagaatancctgaggtcccctcgtcccatccaagctaccaccanggccancaatgca

SEQ ID NO: 862 - DNA, 289 bp, Homo sapiens
  misc_feature (1)..(289): n is g, c, a or t
tttagggtngggaaagccagctttattgagtaaacttcccaggacctggacatcttagatctccccttcccccaggagataggacccctaaacctcccctgggtcctaggacacctgacccaccanttntagtctccantgaggaggggacccttatttggcaagagatgaacatttaagcagctttccgccggagaaaggacgatggctgaaaggantgaaccaccgcagcngttttctctcctntccagntttggacaggacctccacggcccggcnttcctggctc

SEQ ID NO: 863 - DNA, 161 bp, Homo sapiens
  misc_feature (1)..(161): n is g, c, a or t
aggacttcactgccacctttngccncctggatagcctgaatactcgcctcttnctgcagggacccaagatcgcagaggagtttnaggtggagctggagngaggcaagangntgcacatcaaagccctggncgtgagcgacctgaaccgggccagccagagg

SEQ ID NO: 864 - DNA, 505 bp, Homo sapiens
  misc_feature (1)..(505): n is g, c, a or t
aggcaacaaggtttgctgctccntattgtagatctgggaaggggcccatcctgatggagctgcagacttaccgttaccacggacacagtatgagtgaccctggagtcagttaccgtacacgagaagaaattcaggaagtaagaagtaagagtgaccctattatgcttctcaaggacaggatggtgaacagcaatcttgccagtgtgggaagaacttaaaggaaattgatgtgggaagtgagggaaggagattgaggatgcttgcccagttttgccacggccgatcctggagccaccttttggaagagntggggntaccacatcttatttccagcgacccacntttttgaatttcgttggttgccantcagttggatccaagttttnaagttcagtncagtttaagggggagggagaagggagaggtttattacctttncaggggggtntaccccagacagtttttttcaaantttgggtttaaagggagggaaggaaaaccccat

SEQ ID NO: 865 - DNA, 555 bp, Homo sapiens
  misc_feature (1)..(555): n is g, a, c or t
taataatgggtcttttaatgcactaatgtacaaactgcatgcaanttactaccntgctcaatctacacacttaatggaagtttccaagaatttcattgaatttcattgactgggttttcttcctccttaaccaagttgagaacactgtctggtagccccctgaaggtataacctctccttctcctccccttaactgactgacttaaacttgatccactgattggcaccacgaacttcaaaaggtgggtcgctggagtagatgtggtagcccagctcttccaaaggtggctcaggatcggccgtggcaaactggggcagcatcctcaatctccttcctcacttccacatcaatttcctttagttcttccacactgggcaagattgctgtttcaccatcctggtccttgaggaaggcataatagggggtcactcttacttctttacttncctggaatttcttctcgtgtacgggtaactgactccnggggtcactcatactgtgtccgtgggtacgggnaaggtntgcagntccatcaggntggggccccttcccag

SEQ ID NO: 866 - DNA, 570 bp, Homo sapiens
tttttttttttttttgtggtagacatacagatctttgttttaattaaaatttttccttttacagtttgtacattcatgaataggtattcataggcagattagattttcctagatacaaagattaacaggaaacaaaaaaggaaatggtattatggggataaggctctatttgtgctgcaatagctctgtaaacttgattatattacctgtttaggtgataaatatgcgtaccattagaccaatggacatggaaaccatagaagccagtgtcatgaagacaaatcatcttgtaactgtggaaggaggctggccacagtttggagtaggagctgaaatctgtgccaggatcatggaaggtatttcaaagaaactggttctagaatacagtcaagctatagtaaacatcatgtacctgaatacgtacaggataaagagattgaaagctaggagtggccaaacgacttcaactttaaacttgtaagtttggcatttctcttcaggcagatatttttaaaagcaaatccagaaagcggttcccataattagcattcttacatttctcttctgggc

SEQ ID NO: 867 - DNA, 229 bp, Homo sapiens
tggcaagagataacacaatttatttaaatatattccgactcaagatgaaggcaagcggtttacctagaaaggtttacatattttagctatagtttttcattgaaccatttttttgaaatgtcattcttttcattcatgcttcttttatcctcttgctttagaagttcacagtgttatataagtgaaaaacaagacagatagaaaccaccctaaacatatggctttatgt

SEQ ID NO: 868 - DNA, 326 bp, Homo sapiens
  misc_feature (1)..(326): n is g, c, a or t
ntcctatccgacttgcctagtcctcngngataagaagttggtgttcagcttagttgattcagtagttgttaccaagaaacatatgttataggaaaacaacttggtatttaagtatgaagtggatgaaatgtttatttatttaaggtgaaagcatttgacccagggtgtcttcatcttcaatttgggtttaatgttatagaaataaatgatgataaactctaactaataaaggaaagagaatatttggttactcagatccatttttaacctctggtgctgtataaagggaatattaaactagatgtaaatcaaagtatatgtttggg

SEQ ID NO: 869 - DNA, 379 bp, Homo sapiens
tttgttttatgagttttattcctccttgagttgagaacacagtttcttaaatttgaccatgaacattccattgagagactgatgataaattcacacgtagcctccctttaactgacggacttaaacttgatccatggatttgcaccacgaacttcaaaagatgaatcactgctgtagatgtgatggcctaattcttccaaatgtggctcaggatcagtggtagcaaactgggcagcatcatcaatttctttcctcacctcagccccaatttcctttaattcttccacagtggcgagcttgctgtttaccattctatcttggagaattattataggatccctcttacttcttacttcctgaatttcttctcgtgtacgat

SEQ ID NO: 870 - DNA, 810 bp, Homo sapiens
  misc_feature (1)..(810): n is g, c, a or t
tttttttgcaattggtttgagaaggtttaataatttggggtcagcagaaaagaatgttaggtccagctcatgggtgtgactttctccacgccccgcgggaagaaatttagaacaaaagatggtggtcagagttcaggtcccagatctcacttatctgaggtctacgtgcaagtggatgtgcaagcagatctgtttggtgagggttcggtttcttccaaatttaatacaaaagccacatttggattttccgatgtcccaagtgtgtctaggcactgcggaacgtcgtcatgtctttgggttctctgctggggacgcaccagtcatcagcctcgtggttggtgttgtaatgcttccaggcagctttgttatacactgggagtctttctattgagtctgttgacagagccttaatgtagataactgcatctgtcccgtaaccctctagggaatacagcttcaggtctccttggaagtattgtgcgtaaagacgtgatatgggcaatccataaccaaaaccagccagaggcactgcgcgggaggtctcaacacgaggtcttggtgcagttgaatacatgtagttgaaaagtctgtcaattttcctcaaaggaacgccacctnctcggtcactcatcttcacagtcaaatcctcattacccagcgtgacatgaactttgattaggaggtaaacacctctgttggcattgtagttcatagtggctctcattgcattcttgaaaaagttaacaccatgtgatagaagatggaatgtacataaaccactagtaattgctgtactggtgattttgcatt

SEQ ID NO: 871 - DNA, 299 bp, Homo sapiens
  misc_feature (1)..(300): n is g, a, c or t
ttttggacaggaagtagaatttattggtgagtattaagaggggggcagcacattggaagccgtctttgccacaactttttaccatgtacttattggcacaaattcgggcagcctccagggnttcagaggacagctgctcatattcatctgacaccatgtggccacaaagcggaaactcatccacttttncctttttccgccccaggtcaaaaatgcgaatcttggcatcagggacacctcggcagaagcgagactttgggtacggcttgttcttacaataccggtaacaacgggcgggg

SEQ ID NO: 872 - DNA, 340 bp, Homo sapiens
  misc_feature (1)..(340): n is g, c, a or t
cttgggtgtcgccatggncagccgcccngcccngttgttaccgggtattgtaagaacaagccgtacccaaagtctcgcttctgccgaggtgtccctgatgccaagattcgcatttttgacctggggcggaaaaaggcaaaagtggatgagtttccgctttgtggccacatggtgtcagatgaatatgagcagctgtcctctgaagccctggaggctgcccgaatttgtgccaataagtacatggtaaaaagttgtggcaaagacggcttccaatgtgctgcccccctcttaatactcaccaataaattctacttcctgtccaaaaaaaaaaaaaaaaaaa

SEQ ID NO: 873 - DNA, 307 bp, Homo sapiens
  misc_feature (1)..(307): n is g, c, a or t
gtgaagtcaaaactgtttattaatatttggtgacaaaagaacttaaattgaccgaaaatcaaaagttacattgccttggtacagtgcgcctgggtttgtcaaggctgctgctacaaagctggagaacacagcacagggcgangaganggcaaagcggcccagcccaacagccgggatggggcagggagcgtccctcaggccgccgcggggtcaccgnananacctacccggtgcatgcctctacgcggcctaccggaagaaggggaaaccgaaagccctagagcaatgggaataattaagagtccct

SEQ ID NO: 874 - DNA, 329 bp, Homo sapiens
  misc_feature (1)..(329): n is g, c, a or t
aaattaccgcgttctgtgtgaagggactgagggtgtggtgtcattggcagagggtcattttaggagagctgccccagcccctcgaacgcctggcttggggtgtcattctgcctggcggccagncgtccagcttcccctgccccgggcctgggnntgtcactggccctgatccgaacacctccagattccggcttctacatgggacagacggggacgcacaggccaccttccttctggcagggactcttatttattcccattgctctagggctttcggtttccccttcttccnggtaagcccgcgtagaanaatgcaccgggtaggtttt

SEQ ID NO: 875 - DNA, 437 bp, Homo sapiens
  misc_feature (1)..(437): n is g, c, a or t
atcttccccatcgagtaccatgatatctggcagatgtataagaaggcagaggcttccttttggaccgccgaggaggtggacctctccaaggacattcagcactgggaatccctgaaacccgaggagagatattttatatcccatgttctggctttctttgcagcaagcgatggcatagtaaatgaaaacttggtggagcgatttagccaagaagttcagattacagaagcccgctgtttctatggcttccaaattgccatggaaaacatacattctgaaatgtatagtcttcttattgacacttacataaaagntcccaaagaaagggaatttctcttcaatgccattgnaacgntgccttgtgtcaagaagaaggcagactgggccttgcgctggattggggacaaagaggctacctatggtgaacgtgttgtagc

SEQ ID NO: 876 - DNA, 83 bp, Homo sapiens
  misc_feature (1)..(83): n is g, c, a or t
agaagtcagcatccaaggtaaaagaattctctgttggacttgacatcnactccccatcctctgatancnggcctantcctctt

SEQ ID NO: 877 - DNA, 351 bp, Homo sapiens
tttttctttctcctgcagcaagacttttatttaggtgtcgggactgctctgccacagctgcccacctggggcgcgtccctgctggccgccccgtcacggcccgaaccagctggggatgccgccccgccgcgggtcgctgctctgccacagctgcccacctggggcgcgtccctgctggccaccccgtcacagcccgaaccagctggggacgccgccccgccgcgggtcgctgctctgcctctgctgcctctcctcctcgagcatgctgtagaggtcgtcggcagcgctgccttcaggggtctcgtctttctcgggaaacagatctgggaacgtgaaggtctgtccatgggc

SEQ ID NO: 878 - DNA, 347 bp, Homo sapiens
tttgatatgaaatctatattttattatgatggtttttagactcatttagaaattgggcaaatggaaagtgtagtgaccttgacagaacattataacatattaattaaaaatttaaattcataaattcataaatgtaggccaaatcaagataccatattttagattttgatatactatcaacaaacaataacagatttgctcatcgtcacttattcgactaatatttgaatgctttttatgtgcattatattctagatactagggatacaatagtgaaaaaaacaaacagctcctgtccttctggaacaacggaaatacatgaaaaaagactgttttgcatttgtttt

SEQ ID NO: 879 - DNA, 393 bp, Homo sapiens
ctcaaagaaggcaaggggtagaggaactttctccaaactttccaaatatattatctacaacaaaactttctgtgtatccaatagttctgatactgcatgtgttcagtaacttagaagtctgaaggattctcttcttggctcaagaggataaacagtaggccctggcaacatttctgtttaacaagcttgttcagaaatggggtccaactaatcttcgtcagtcaattgagaaagcaatttaaataaaattagagatggggagttggaattcccaaaattccaagtcattcgcatcccatagaggaaaatctggaaggtccaaacacttcagttacggattttgggaactgttagagaaaagacttatcttctctgcaattttctcttttcttt

SEQ ID NO: 880 - DNA, 502 bp, Homo sapiens
ttttttttttttttggctgggactgccccaaaggcagacgaggtttattgggcagcagctgggaaaatcagcggttggacttggccacacgctccagctcgtccttcttcttaatggcataggagttcgaggagcccttggcagcattgatgagctcatctgccaggcactcagcaatggtcttaatgttccggaaggcagcctcacgagcgcctgtgcacagcagccagatggcctggttcacacggcgcaggggggacacatccacagcctgtcgtctcacagtcccggcgcgcccaatgcgtgtggagtcctcccggggaccactgttgatgatggcgttcaccaggacctgcagagggttctcgcctgtgagcaggtgtatgatctcgaaggcatgcttgacgatgcgcacagtcatgagcttcttgccgttgttgcggccgtgcatcatcatggagttagtgaggcgctccacaatgggacactgaactttgggaaa

SEQ ID NO: 881 - DNA, 409 bp, Homo sapiens
accagggcggcgcgtggtctacgccgagtgacagagacgctcaggctgtgttctcaggatgaccgagtgggagacagcagcaccagcggtggcagagaccccagacatcaagctctttgggaagtggagcaccgatgatgtgcagatcaatgacatttccctgcaggattacattgcagtgaaggagaagtatgccaagtacctgcctcacagtgcagggcggtatgcgccaaacgcttccgcaaagctcagtgtcccattgtggagcgcctcactaactccatgatgatgcacggccgcaacaacggcaagaagctcatgactgtgcgcatcgtcaagcatggcttcgagatcatacacctgctcacaggcgagaaccctctgcaggtcctggtgaacgccatcatca

SEQ ID NO: 882 - DNA, 390 bp, Mus musculus
  misc_feature (1)..(400): n is g, c, a or t
agttactctctaagaagcatgctgcctatgcttggcctttctataaaccagtggatgcttctgcacttggcctgcatgactaccatgacatcattaagcaccccatggacctcagcactgtcaagacataaatatttcttcaacccacccaaattcctttgacttcaaacttgaaccccagggcacagatccttaaggtcatccccactgtgctctcaagagagggctcttcttgtggtgtctggggttggcagggaaaggtgagtcttcctgcctgtgcagcttctgatgctgcctccttctcagcggaagatggagaaccgtgattaccgggatgcacaggagtttgctgctgatgtnacggcttatgttctccaactgctattaagt

SEQ ID NO: 883 - DNA, 466 bp, Homo sapiens
  misc_feature (1)..(466): n is g, c, a or t
attnntcttttttcctcttgggcttggatattggaccctgggacagagcagccagttgttcatgtactgcccgaagctgttcctgtagttctgctaagcgatgagccctttcttcctctgagtctgagctttcactctcttcttcctcctcgtcctcctcatcttcctcctcctcttcctcagaggagctctcactgctactttcctcactgggagggactctgaagacgatttgggccaagccggggggcatggcagntaggagactgggtaaagggcccgggttctagtgggttcatctgggcatcttgggcataacgggaactcaaatacatcctgtaggctttcggtgccattgccacaacatcgtgatctgggggggattgtacttataggcagttgggagaacataaggccgtacatcaggcaggcaaactcccgtggcatcccgggaatcacgggttnt

SEQ ID NO: 884 - DNA, 378 bp, Homo sapiens
  misc_feature (1)..(378): n is g, c, a or t
gaggaaggcaacactgctttattaggccgggcagccaggagcagacacaccggctcctcagtacacattcccccacccctgcctcggtgctccccactcagggctgggcatggagggggcagcgtaggtctggaagcgcttgtgctcngctggtgcgtganagttctcagggacatggtttccacggccatctccagcccgggctgctgggttatctccactgtgtagtcattggccagctgcagggaggccagcatggaacgacacacctcgaaggccggntgcaagccaccagntccgcaaagggacaccantcattgagctgggggaaccntgagaccagntggtccccataggtttggatttcaaagggcacat

SEQ ID NO: 885 - DNA, 394 bp, Homo sapiens
  misc_feature (1)..(399): n is g, c, a or t
gctagcaccatgagcttcagggactgggaggacacagtgcagcctctgctccaggagcaggagcagcatgtgccctttgacatccacacctatggggaccagctggtctcacggttcccccagctcaatgagtggtgtccctttgcggactgggtggctggccagccggctttcgaggtgtgtcgttccatgctggcctccctgcagctggccaatgactacacagtggagataacccagcagcccgggctnggagatggccgtgggacaccatgtccctgaggattgcttcacggcaccagngaggcgcacaagttttnccaggaccttacggttgccccttccatgggcccagcccttgagtngggggaggcaccgagggcagggggttggg

SEQ ID NO: 886 - DNA, 613 bp, Homo sapiens
  misc_feature (1)..(613): n is g, c, a or t
gaacagcaaaactgagtatgtttactttacacaaagtacaatccagtatatgcagaaaggtactcagcatcacactcgtgatcaatatcctcttatttccatttggtatgtcactganaacctggcacaccacttagctaaaaatcacataaaagaacccctagagaaatcaaactgatgttttttttcccccaaacaatagatttcctcttcattagtcaaatctgatagtgatattcattaataaggaaaactaaagttttcaagcatcaactctgaatggcagagaccctaatctgactgttattagccaccaagaactcagaagagcaaagaactcaagaagaggcaagcaagagcactatggaaattatattcttttctgtgaaattcagtcccacagctatttgagcaagggcccaagacgatggagaggcggcaaagctgctgggagggcctgttcgcagggcaggaatgcactggctgtgcctcgcccccggccatgtccttccacaggtgggctcttcactggcttcacttcagcttgatcctctggtctccccacagcttcctggggagactttgggttgtaatctttacagttccaagaatt

SEQ ID NO: 887 - DNA, 156 bp, Homo sapiens
  misc_feature (1)..(156): n is g, c, a or t
tctccgaggctcatggcgactgctggtcctagtacccggacgagttatgcggcctctgggtggccaacntttgnngcattcttgcctcgcggactcgagttttggggcccagccgaggggactgcgagagtcttgctgaggcagttctgcgcgcgg

SEQ ID NO: 888 - DNA, 589 bp, Homo sapiens
attatataacattttatttaaaaaaattattttcatagaatacattttcacattagagattcccattgtgcgaaaataacaatttattacttatagttttatatttgtggacagattgttttagaacaagtagaatacatttgggaattaaatctcaatttacagttggtagtattttgatacatctacggggaaacttgcccttaaatggaacttctgtatattcagaagcactccaagcgtttcttcctaggatttagaaatttataatatgagctatcagcatttcctaattttaaaatttccctagtatatgtaaccatcagtaggtggtatctactgtctagagagggaagttttcgaaaattaaacactgtctaattttctgcaaagtttttattcatgaattaagagtatttccctttgtccattattcccaaggcaaatatggaagtttgatcatatactaatcgtaataaagttggattctctttaagagattgataaattgaaaggcaaaagctgatatatcatgtttagttatactgtgagtcttataagaagctgggaggcaaccccattaactcac

SEQ ID NO: 889 - DNA, 324 bp, Homo sapiens
ttttttttgcaggttagcattttattagataaaaacaggaaggagggtgcctacccacccctgcctgctactggctctgaagggcactcctcaacttccccaagaaagaggacgcgtctctgacactgtgatcatgacaggggttcaaacagaaagtgcctgggccctccttctaagtcttgttaccaaaaaaaggaaaaagaaaagatcttctcagttacaaattctgggaagggagactatacctggctcttgccctaagtgagaggtcttccctcccgcaccaaaaaatagaaaggctttctatttcactggcccaggtag

SEQ ID NO: 890 - DNA, 434 bp, Homo sapiens
tttttttttttttttttttttgagagggggccaggccctttattaaacattcccgggaggctcatggcctggggactgcagctcatttggaaggcactgggttttgcgcccaagtggactgtttccaggaggtgccactggagggaaaagggctgcctggggccagggaggctgcctggttctgcctcccgggctgggtcagtggctttcctgtccccaggcctggaggaccttgcagggtctgtttgctcctgatccctcagggtgggcatgggacaggtgtgtgccagtgccagctgtgtgccagtgggcaggtcacagcttcttcttggggcagtgctgcagggccgccctcagggcctccgtcacgcggtccacattctcgcgggtggcattgcagcccagcaggccgatccgcagcaccttccccgtgg

SEQ ID NO: 891 - DNA, 400 bp, Homo sapiens
  misc_feature (1)..(400): n is g, c, a or t
ngaagggatagccagcgcgaaggaagtnctggagtcgtgtgttttggctgcgcgtgatcctgcgtgggtcgggaggtgtttctgtgtaggtntctggccctttnatcagtcgtgcggaggaccgcgtgatttccttccagttctnctcggntttcangaaaagcctaaagattagactntaagaaaaganaatagaagccatgtttcgaagacctgtattacaggtacttcgtcagtttctaagacatgagtcccganacaactaccagtttggttcttngaaagatccctggaatgcactttnctttnggcccaggtngggtcagggaccctgtctttttaggacaggntcggaagggaaaaaaatcccagttcacaatantttttntcttaggcaact

SEQ ID NO: 892 - DNA, 338 bp, Homo sapiens
  misc_feature (1)..(338): n is g, c, a or t
aagccataaagattatacatgacttggaaatgagactgtaccaaatgatggccaaagaagaatcatcctttctactccttctctttcgnctggtcactcagaaatataanattatcagctatgattgttgttgcttgtcgcctcacattatttttatccatgtattcaccatagnctattttcccttccaaataaattcgagaccccttnttcacatattggatatgccacggctctgagggctggggcgggnaatactggatattctgtgcccatggttgtcttttggactggacatcacccagttnggggaaactttcactatcccctggatcggc

SEQ ID NO: 893 - DNA, 431 bp, Homo sapiens
caccaagagtacaggtcttctttaaggaagaataaaaaagaagaggttcatttttctggcttttattttcacctgaaacactttttctcgagtccaaaatcattccccccgtgaagtctgcttaccaaaacataagacgacttatatatttgaaagaagtcaaatgaatgagctctctaatagaagtccatgagttgagtgggtatttcttatttgaaagtgtttttctttaatcaaaagtccttagaatgagggaaacaaaatatttatttgttttggaatcccgcttatcaaatcattcaaaactttcagctggagtggggtttgcttttgttttgtttgtgtccataagagaaatggtagaagatgaatcagtatgaagacactgtcaatgaggttatgagaaaaaaacagcaggggcattagtttca

SEQ ID NO: 894 - DNA, 407 bp, Homo sapiens
aatgtaaaactatttttttctttattgaaaatacatctacaaagtaatgcttcccagtccacactgagtgcatgtgtatgcagagcctgtgatggcttggcgagaggatgggctccccacaggacctttccataagaaatggttagtatattaaaaaacacatattgtgtaacagaattaagttgatatgattaagtctttgctctactagtgtcttaagaggacagccacgtactttaacatttgtagtgtatttccgaaatagagcctcgacattaaatggttactgcaccacagcctaatgttaacttttatgcacagaatgcttggggtctatataaaaatatctctaattgtatatcagaggatctatgtctagatttttcagtttgttagcataattaagt

SEQ ID NO: 895 - DNA, 402 bp, Homo sapiens
  misc_feature (1)..(402): n is g, c, a or t
tttggaaaaagaaatttttttttaattagaaaccaagtttacatacggttaaatggttactaaaagctcagttgtaaccactcctaacaccactagcagaacctcaagggagccaagagctcttcccttttcccctgttaatttccagtataatgtagcagcacaattatttcatgtcacatttaagaagaacaagaaccaatttatataaagtacaattgtatatccttaaacattccacataaacacactgtcaaaactcactggatatgctggaattggaggacttaaatttctacatattatttattgcacccagagtactggttaaaatgcactttctgtggaaggattcaaaatggcaataacgtatggagggtattttttaacactggtgaangt

SEQ ID NO: 896 - DNA, 409 bp, Homo sapiens
acatcgctaggtggtgcttactaattaccttctcaggattttcctcagattgaaaagcttatgaggatttcttgggagtcttaataacctgcctgttagtacagagctttcctgatgatatttactcttgagcacatgtggttgtaaaaccttaactttctttctccaggagggtggtgatagaaacagatggtagtatttatgaactgatgttctcgtgaaatgttgagggtggggagaaaagactttaagggaggagagccatctattttgttcctaaagccacctctcagcagaatccgtcatgtttttctgatgcaccgctcctgcttcatgcccaagatgacttgcgaggcaatctcaggagctgtggacttaaccattgcaaagcacactgtctttctcaacg

SEQ ID NO: 897 - DNA, 248 bp, Homo sapiens
gcagcctccgcctggaagatggccgcacccggggagatgtacgtcagaaaaatctcgatggtccccaaaatatacatggcccctgcaaacgtcgtgcccaggtagaagcagaggccgacagcgcctccaaactcgggtcccagcgagcgcgatatcatgtagtaggacccgccagctgggaccacaccgttggtagcgatcgcactcatggaaatggcggtcagcattgtacatgtgcagcacatggc

SEQ ID NO: 898 - DNA, 381 bp, Homo sapiens
  misc_feature (1)..(388): n is g, c, a or t
caagcaaagccctacagacgctgcggctgagcannnntgtggacagggaggtggccgagatccggcagaggcatgaggcagagaaggccgcgggcttcatctccgtgctgaagctgttccggatgcgctcgctgcgtgngcantgctgtccatcatcgtcctcatgggcggccagcagctgtcgggcgtcaacgctatctactactacgcggaccagatctacctgagcgccggcgtgccgaggnaggcacgtgcagtacgtgacggccggcaccggggcctgaacgtggtcatgaccttctgcgccgtgttcgtgggtggagctcctggggtcggaggctgctgctnttgctggggtttttncatcttgcctcataagcc

SEQ ID NO: 899 - DNA, 174 bp, Homo sapiens
  misc_feature (1)..(177): n is g, c, a or t
atgaagaattctgactcagtgtctccacaggaacctgntccncagctttctggatgtcattatttctgacatcacancntcctagacaggtatntctgganaagganctggnaagaggntgaatntggctctaaacaaatncccatggncccngaagacctgttggggccaccg

SEQ ID NO: 900 - DNA, 546 bp, Homo sapiens
ttttttgtgattctgccaataaatactttaatgagaaccgaggtctgtaacacatatagcaataaccaccctggcctatgccttctgctctagcccaagtctggggctaaccaattacatttaaccacatttggaaagcaggccgttttcaatgtcacccatcagtatccatcttcatagaagataccaatctggggccagagtctcaatgttaacactttctctcggggaaaagttaacatggtaacacaaacatagaaataactttgaaccaccccactgttcttccatcaggaggcccttaggagaccaacggcttggtaaacacttacaacattgtcaaaatacattagaacacgggaaaagggcaaaggagtagaaaggctggcagggctgggctcacatataattcagttcttagatttgaagcctctttagctgctcgtatgtaataaaaaaaatgatgttccagggtccaagccgaagccagtttggccaaaatcctttatagagtgcaaaaaagccctcatgtttccacatctttaa

SEQ ID NO: 901 - DNA, 526 bp, Homo sapiens
gtaggagtagagctaccagtctatgatattactaagaagcatttaatattgtcaggaatgatgggcgatacaattttaactcacttcgtttccagctttacatgtggtttggctggggctctggcctccaacccggttgatgtggttcgaactcgcatgatgaaccagagggcaatcgtgggacatgtggatctctataagggcactgttgatggtattttaaagatgtggaaacatgagggcttttttgcactctataaaggattttggccaaactggcttcggcttggaccctggaacatcattttttttattacatacgagcagctaaagaggcttcaaatctaagaactgaattatatgtgagcccagccctgccagcctttctactcctttgcccttttcccgtgttctaatgtattttgacaatgttgtaagtgtttaccaagccgttggtctcctaagggcctcctgatggaagaacagtggggtggttcaagttatttctatgtttgtgttaccatgt

SEQ ID NO: 902 - DNA, 515 bp, Homo sapiens
cgccgcggcccggtccgggaaggccaagctgacgcacccggggaaggcgatcctggcaggcggcctggcgggtggcatcgagatctgcatcaccttccccaccgagtacgtgaagacgcagctgcagctggacgagcgctcgcacccgccgcggtaccggggcatcggggactgcgtgcggcagacggttcgcagccatggcgtcctgggcctgtaccgcggccttagctccctgctctacggttccatccccaaggcggccgtcagtcttggaatgttcgagtgtcctcagcaaccacatgcgggatgcccagggacggctggacagcacgcgtgggctgctgtgcggctgaggcgctggcgtggccgaggccgtaggtggtcgtgtgccccatggagaccatcaaggtgaagttcatccacgaccagacctccccaaaccccaagtacagaggattcttccacggggttagggagattgtgcgggaacaagggctgaaggggacgtaccaggg

SEQ ID NO: 903 - DNA, 366 bp, Homo sapiens
tggtgtcatcaatccaatttattaagtcctcaatgagggggaggaagggccacatctccctctgcaggccctttgaccatcttgatggcttctgctcctccctgtcccctcagctctgccttggtttccccactgacaaaggggatcttctgctgtcctgtgtgccctgaaactaaaacccagggggaggccagaaatcctcagaagttttccagctccctgcaagaatagccaaggacagagaaatcacaggatcaggacgagcagggcaagctggagcagggggtagaacagaccaagtcctttaccgcagaggaagaaaccacactgtggaatggaaataaatagaggggtccagggcagcag

SEQ ID NO: 904 - DNA, 492 bp, Homo sapiens
tcagataccaccaccaatatttattacccaaagcaatctgaaagaatcgggcacaaggtcatggctttcccaggttacaagaaaatcagaacctcttcaaactcaccctccacccatagccaaagtaaggaattaaaggctatagctcaagctatgtcatggctactatatcctcattcttgatgaatagtctcaaagtcacaagttggcatgatgcgatttaggtccaaatcttaccagaaaaaaaacccaccattaaaataagacaagttccatagaatcattccaacacgaagataccaagagcctttactggtaatgagaagaggaaagaatttccggttaaaattaccaggaagaaatggaattgtccaattaccatccattgagtatgagcctagttgagttgagtaagagtccagtatgggatggccaatcctccgggttggggaaatcctgtgagctcaccaaaccctcctgggctcggtgagg

SEQ ID NO: 905 - DNA, 168 bp, Homo sapiens
ttttttatttccaactacacagtttattagtaaagtatctcaacaatatctcagagcagtaaaaaccaaggcatccccaacactgcatgcgtgactagaccagcaagaagtcctcaacttgcaccagtccacatggcagcagggggcagtggtgagtcctccgggccc

SEQ ID NO: 906 - DNA, 393 bp, Homo sapiens
caggagtggggtaaatcctttagttagtgcatttgaacttgatacctgtgcattcagttctgtgaatactgccctttttggcggggtttcctcatctccccagcctgaactgctcaactctaaacccaaattagtgtcagccgaaagtaggtttcaagatagtcctgtcagtatttgtggtgaccttcagattagacagtcttcatttccagccagtggagtcctggctccagagccatcgtctgagactcgtactactggatgttttaatatcagatcattacccaccatatgcctcccacaggccaagggaaaacagacaccagaacttgggttgagggcactaccagactgacatggccagtacagaggagaactagggaaggaatgatg

SEQ ID NO: 907 - DNA, 376 bp, Homo sapiens
gcaattggcactgttattttattagtacgagtatactgaaacaataaacttgtactggtatacagacaatttatttaaaacaattttgttcaaattttgaatcaaacattgttttattataataatgaaataatttctacctagaaaacctgcaagcaccatcaaagaaagggaccataaaattcaataaacagactcgagtgtatcctacaaatagacacaccacgattagaaaatagaatatgaattcttccattttttaatatttgtttaaaaaaagctagtgcaagtacaatattttacactggaattacagagagtatgcacgcatatggaaaaaagttctcctgtcacaataaaagctcttaactattat

SEQ ID NO: 908 - DNA, 278 bp, Homo sapiens
  misc_feature (1)..(278): n is g, c, a or t
gtggtaaatggctgactgctgctgtggactggccagatggagagcctgggcgcctggtgctgatggtgctgaacaggactgggtgcaggatgacttccaccatnttggctttgctgctgtccagtgggggtagctgaaggctgagggtttggagtatntgggtncagggtagcnttagggtgcgcatactgctgagcaagggancccntggaaacatacatcgcatgcgtctgctcatgagccccntactgagttgctgaagaagatacttaaaccag

SEQ ID NO: 909 - DNA, 392 bp, Homo sapiens
  misc_feature (1)..(399): n is g, c, a or t
agagagctagcaccatgagcagtaccaaatatgccccaacagcggcaagaccagcatcatcagagtgccatgatgcacccagcgtcanagncgggcccaccgattgcagccaccccaccagcttactccacgcaatatgttgcctacagtcctcagcagttcccaaatcagccccttgttcagcatgtgccacattatcagtctcaggcatcctcatgtctatagtcctgtaatacagggtaatgctaggaatgatgggcaccaccaacacacggcccagcctgggtttagtatcttctttcaggcaantcagttacgggggcttcatgnggcaggacgctggcgattgtnttgttttccanggggttccnttggttcaggcagttttgggg

SEQ ID NO: 910 - DNA, 524 bp, Homo sapiens
cctcccattttatttcataatacattttcacagaaacatgatatatttacaaatatacaggtaagagactgctggtcagaaatcttaaaactcaaaatgtcatcaaaaattaatttacaaaagccaccaagggtccatggaggcggccaggtggatggtgtggccggcgtctgcgtgacctggcccagaagcccacgcagcctcccggctctgactccgctggccccgtctcaggaagcgctggtttgcaggtttttggaagctgcaagcatcgctctgactttggccatgagatcctgagtgattttgctctgcacggaagaaacgattgctgaagagatctgggcttctttttcctgagagactcccctggagcgctcctggctggagcccgactctccacaggggagacgctggctgagtgcgccgagtgggccgcgggggcgtggcggtggcgctgactgcttgctgggtgacacgactgaacctggcttgacttggtcgcgacgggacgctcttttctt

SEQ ID NO: 911 - DNA, 451 bp, Homo sapiens
  misc_feature (1)..(451): n is g, c, a or t
tttctcgnctgagtccttgttggcccaatcctgtctctcctgttgccaaaaacatttctggaaccacaccccaggttcccaccccacatgactcttccatctcctgacagcatccttgggaccttccccaggggacagcacaggaagcagaggacccaacgcccactcctggaacaaggcctggtccatgaaagatgaggcctggggcatgaggctgacacgatcagctggggaacacacgtccctcgagactcagttgtatcacttgaaaatggggatgtcaggacaagtgaccacaggggcctttttattctaccctgcaggaccctattccagggcgacaactttcagagagctcagggcatgctcgagctgcctagggggcaggctgcaggagggaacttgactggactctgagatgctgggatcccgcttaatgactctgacagtc

SEQ ID NO: 912 - DNA, 476 bp, Homo sapiens
ttgtgaattatgattctttattcttattggtgcctatgaaatgcaatagggaaacatgtctactaatgagttttgtctttttccacagagaaagcttggactatatttctggaaggcacccactgtggggtgctgcttgttctgtggtgttgctgtgcagcggcaaggaggagcagagggctgcaggagaccctctgagattctgctttgtgcacatgtactgccagcgcatggcattcttgagcccataaagcaagacttctcaggccctgtggttagcatcccccacacccatatcagccactagcattttaaagatggttttaggtgggtacataagggcccagaaaaaaagttttacaattattttaggggcctgaaccctcatgtcatagctaatcagtgaatgaagttaccttttaatccaagagactcatccctgttttcttgggtactaaaactttcagcaatctgaa

SEQ ID NO: 913 - DNA, 382 bp, Homo sapiens
aagagaggccagaaaaagttattttaattttctattaaacattcttctcaaagcattattttatcctatatctcactgaattttaagaaataacattagtattagaaaaactaggaaaaaagataaatgcagataattaaacttacatgaaaaaggaaaattataacaaaggactgagaacgttataaattgaaatgagattataatttgaaaactgcatctgaaagcaaactttattgttcaattattcttaatgatggtgttttatgactaatacactgatttttcaataaggaaacccatgttaaaaatatttttattttaaaaataagcctgtgttcaagctctgatcatatttcttttattttgatttgggaagaaa

SEQ ID NO: 914 - DNA, 435 bp, Homo sapiens
tctcctgtcgcgcacttcctcctgccgcagaatggaattcggcattgttcctacacagcttctcggcaacatctctatgttgataaaaatacaaagattatttgccagggtttcactggcaaacagggcacctttcacagccagcaggctttggaatatggcaccaaactcgttggaggaaccactccagggaaaggaggccagacacatctgggcttacctgtctttaatactgtgaaggaggccaaagaacagacaggagcaacggcttctgtcatttatgttcctccgccttttgctgctgctgccattaatgaagctattgaggcagaaattcccttggttgtgtgtatcactgaaggaattccccagcaggacatggtacgagtcaagcacaaactgctgcgccaggaaaagacaaggctaattgggcca

SEQ ID NO: 915 - DNA, 458 bp, Homo sapiens
  misc_feature (1)..(458): n is g, c, a or t
atctcacaagaatgaagcaagggacaaaggtaagtgccacgctccctggccactgggttcctggcaagctcccagccactaggtgccaatctcccttcaatgtactccttcttccccagagtgcagaagcgtatgaagacagttatgacatggacacatgcatgagctattatacataattacaaaagctgattctgtcatcaccacatcttgtctcatcagtaggagcgaatggctggcgggacggtggcacagtcagcctcgttcaaagttttgtcgatcacgggtctatattccagagtgaccttcccagtgccaacgtccacataggacagggtgtgcttcctccagtgctcctcaaagggcttcttctgttgccccnggaanggcttggagtaatcgtactcatcaatccgcaccttgtagtcttcccngggaanngcgncccgngantcctt

SEQ ID NO: 916 - DNA, 368 bp, Homo sapiens
  misc_feature (1)..(368): n is g, c, a or t
atacgcccctgtcgcgaaggaccgtggcgtctagagatgtggtgtctcggtccatgactctggagatccgagaaggaagaggctgtggccntgagaaagatcacgtctacctgcagctgcaccacctacctccagagcagctggccacgcgcctgcctggcatttcagagacagccatgatcttcgctggcgtggacgtcacgaaggagccgatccctgtcctccccaccgtgcattataacatgggcggcattcccaccaactacaaggggcaggtcctgaggcacgtgaatggccaggatcagatttgttgcccggcctgttacgcctgttggggaggccgcctgtgccttgggtaacatggtgcc

SEQ ID NO: 917 - DNA, 332 bp, Homo sapiens
  misc_feature (1)..(332): n is g, c, a or t
gtacgcggctagtgggtcctcagtggatgtaggctgggcgcgcgatgttcgacgggacaccggcgagagcgacctcggggttaaggggtggggctgacgtcaggagccaagatggcggcggtggtcgcactctccttgaggcgccggttgccggccacaacccttggcggacgtgcctgcaggcntccctgaggagcccagacagctgcagccacagctccccggtatcaagaaatttgccatctatcgatgggacccagacaaggctggagacaaacctcatatgcagacttatgaagttgaccttaataagcatctgtggctcttgtgca

SEQ ID NO: 918 - DNA, 454 bp, Homo sapiens
tttttttttttatttcttaaaatttttattatacatgctgtattcatggaaaaccaagatctttaaaggaactcaaattagatataaattatgttcagctctgagctggttataaatcatgtttagcatggaaacagttaaactgaagctttcttctccttataggttgccatcattttcttgatctctgcaatagctttccctggattcagacccttaggacaggtccttgtgcagttcatgatggtgtggcagcggtatagagagaatgggtcctgcagcttggccaggcgctcctctgtgaagtcatctctggagtcaatcatccagcgataggcctgcataagaactgcaggccccagataattgtctcccgtccaccagtagctggggcagctggtgctacagcaggcacagagaatgcactcgtagagcccgtccattttttcacgct

SEQ ID NO: 919 - DNA, 159 bp, Homo sapiens
aaagataaaatgagtatttaattcagtttcagaaaaaaagggtacattacttcgatgagaaagcataaaattaagaggcttttctggaaatccaagaaaaagaaataaccattaatatgttcaatgataattttctagatcttcctcgtgtccaaagct

SEQ ID NO: 920 - DNA, 483 bp, Homo sapiens
  misc_feature (1)..(488): n is g, c, a or t
gaaaatctttgatctacaggactggacccaggaagatgaaagggacaaagatgctgctaaggcaaatctcaactacattggcctcgatggaaatataggctgcctagtaaatggtgctggtttggctatggcacaatggatataataaaacttcatggagggactcagccaacttccttgatgttggtggtggtgctacagtccatcaagtaacagaagcatttaagcttatcacttcagataaaaaggtactggctattctggtcaacatttttggaggaatcatgcgctgtgatgttattgcacagggtatagtcatggcagtaaaagacttggaaattaaaatacctgttgtggtacggttacaaggtacacgagtcgatgatgctaaggcactgatagcggacagtggacttaaaatacttgcctgtgatgacctggatgaagctgctagaatggttgtaaagctctctgaaatagtna

SEQ ID NO: 921 - DNA, 465 bp, Homo sapiens
  misc_feature (1)..(465): n is g, c, a or t
ccttggtatatatgcctttatttgaagcaaacctacaggtgtttcttaatatgacagaatcatgaagacttgcagttaatcagtgtttcctaatgattaaaacaatgttcaaataattacaaagttacttcatcaaaatacttagaagaatattctgaggagtgtttgaaagctctgtttataaatagtgattgatacatttatcatgtatttggtgctgaagataaacactttttacataaaacattgttttaatatactgctctactaatgaggctagttattagatatactgtattttaacactaaagaataaagctttatcttcgnatttatcntatttataggactcttatcaatgaagaactttgnatccaaccaataataaactggcaaattgcaagttacgttttggtaggagaagccaaaaagactgggctgcgaccaaaggaaggagataactgc

SEQ ID NO: 922 - DNA, 482 bp, Homo sapiens
ttttttcatattgggagatttttattaacttaaattgacattcttaattttgtctgtaagtccttggtatatatgcctttatttgaagcaaacctacaggtgtttcttaatatgacagaatcatgaagacttgcagttaatcagtgtttcctaatgattaaaacaatgttcaaataattacaaagttacttcatcaaaatacttagaagaatattctgaggagtgtttgaaagctctgtttataaatagtgattgatacatttatcatgtatttggtgctgaagataaacactttttacataaaacattgttttaatatactgctctactaatgaggctagttattagatatactgtattttaacactaaagaataaagctttatcttcgtatttatcttatttataggactcttatcaatgaagaactttgtatccaacaataataaactggcaaattgcaagttacgttttgtaggagaa

SEQ ID NO: 923 - DNA, 538 bp, Homo sapiens
catcactttagaatatttattgtattccttaatgcatttcttaacatgtatagcactctttaatcaagaatataaagtcatctacttagaatcacattatcttaaagatgcatactggaatgataagtttgaagatgtaactatcaacaattcttttcaaaatcatatcaatatattactctcatggaacttgcacattctaagaagggtcattttttccccccagtactgggaaggtatgcatttaaccatgtggtcagccagaaaggctgttttatatatggtgtgtgttactcataaaaagcctgtcctttctctaatattgtacattacacaattgtagctacacctgaaaagaagtgagtttcaatgaccatcatcacctaaaaacatgaataagtttgtatatttaggaccagaggaatgatatatcgtactgtactatgcctacctctgtccagaggccagctgtctcacctgttcttcagggtgcctagactttttacccatctattatccgggatgcttctgaagtcat

SEQ ID NO: 924 - DNA, 437 bp, Homo sapiens
tttttcaattttaagattacagtgtttaatgtttatcaggatacatttctacagctagcaggataacagatgagttaaggggcctcagactacatccaagggaatgtttattgggcgatcccaattacaccacaagccaaacgacttccagcgtttcctgtctttgtactttcttcatttccacctttgcccaagtcatctgctttttcatggaccaccagtgtgcggccaatgatgcaatggtctcctgagagtgagatcacagaatcttcaatagacacatcggccacaccatctttgtcagcagtcacattgcccaagtctccaacatgcctctcttcatcctttggcccaccgtgttttctggatagaggattaaagtgaggacctgcactggtacagcctgctgtattatctccaaactcatgaacatggaa

SEQ ID NO: 925 - DNA, 314 bp, Homo sapiens
tttctaattactaccttttattctaatgtgaaccatggccctgaaagctgataacaagcttggctgagcagagggaactaggggtcggcagaaaggattatgggtggaaaacattggctcttccttggggagtgatgctggggaaagggaagagagtggctcagcctgcaggtaaataggctagaaaagccaaggaaccaaagtcacgtttgatggcttccagcaactcccctttgggttctccaccaccgttaggctgaggtttgtccagaaaatgctatgattgatatgaccaccaccattgaacttcagtg

SEQ ID NO: 926 - DNA, 441 bp, Homo sapiens
tgatggttgacagattcttttattaacagtcaaaaacttcacacaattggaaaataaatgtttcttcaatgaataatcaaacaaaaattatccaggaccttatagggttttcagtatgtaccaggcttgatgcacatcttagaagacaggacattatcttgctgggatcattagggtatgactgaaagtgagaaacagtaatttgtaaaacatttacctaataatagctttcccaaacagtacttcccctggaattaaaacaggaaatacaatttatgtttatacgtggttttagatatgactcaatatacatagattttaactttatggtttggtattacttttttaaaggcgctcaattagaaattcaaatctcactttaagaccatgaatttcaagttgcaatgaagtgtacaataaagttgtgatttctcaacatca

SEQ ID NO: 927 - DNA, 459 bp, Homo sapiens
gaaatagaaaaggtaaaattgcttttcttctcgaaaagaacaagtattgttcatccaagaagggtttttgtgactgaatcagcagtgcctgccctagtcatagctgtgcttcaaaaacctcagcatgattagtgttggagcaaaacaaggaagcaaagcaaatacagtttttgaaattctatctgttgcttgaactattttgtaataattaaactttgatgttgagaaatcacaactttattgtacacttcattgcaacttgaaattcatggtcttaaagtgagatttgaatttctattgagcgcctttaaaaaagtaataccaaaccataaagttaaaatctatgtatattgagtcatatctaaaaccacgtataaacataaattgtatttcctgttttaattccaggggaagtactgtttgggaaagctattattaggtaaatgttttacaaattac

SEQ ID NO: 928 - DNA, 322 bp, Homo sapiens
cttttttttttttttttttttttgatggttgacagattcttttattaacagtcaaaaacttcacacaattggaaaataaatgtttcttcaatgaataatcaaacaaaaattatccaggaccttatagggttttcagtatgtaccaggcttgatgcacatcttagaagacaggacattatcttgctgggatcattagggtatgactgaaagtgagaaacagtaatttgtaaaacatttacctaataatagcttcccaaacagtactcccctggaattaaaacaggaaatacaatttatgtttatacgtggttttagatatgac

SEQ ID NO: 929 - DNA, 463 bp, Homo sapiens
tttttaattttttcccaagtttatttttctatttttttttcatggaaaaatggggtaacttagcagtttcaatattgaagactgaagtttaaaaaaaatttaaattcaaggtacttttaaaattcagttagaaaagtaggctttaaaaattattagagacaagagtaccaaagcggtgtgtgtatgtgtgtgtgtgtatgcatgcttgtggattggaaaaactttggagactgattacttttcattatatatgtgtcacagtgaaacagcttttatgtgtcatgtaagattactgcttgcctctctaaggaaggtcgtgactgtttaaatagacgggcaaggtggaacattttgaaagatgagcttttgaatataagttgtctgctagatcatggtttgtattgaactaacaaggtttgcagatctgctgacttatataaagctttttgattcctactaagct

SEQ ID NO: 930 - DNA, 284 bp, Homo sapiens
tttgagttgctgaatttttaatctgtaacacaaaggttgccaaacattcccccaaaggagcagctctcagtggggtggcggtggatgcgaaacagctgaagacgcggggcagttggcctggcttccgttgcacgggctggcttgcgcgggagctggtgggtggggagggatggggggactcgaggcaaccccccagagcggcctctgagcgcctaggaggaacctgaaggcgggaagggggaagatcgtcaggtcaaaggcgggagtctcagggcttatggggt

SEQ ID NO: 931 - DNA, 697 bp, Homo sapiens
aaggtagaaggccagaactttataccagtagcacatgatccagcataaaggcagtcttgaaatactgcattatccagggacagggcttcagcagctgatctgtcacacaccaggtgtcccacgtaggaatttcttaaaccacaggtaggatgtagctgcagagagtccataccaggtcacgatgtactgcagatgctcgttcctcagagtaactctggtttgccctccaatgggtcctccagggactgtgctctggaagttggcatcaatgaagatgggctctgcgcctgtgattctggccatagcttccaggtctcgataatgccagtggttcctttctggattgttctcagggacaaaaggctgcctggtttctgtcagcctcaccatcccaatgaggtccacttctccctcaatctggcctttctgccgggtttcaggattcactttcttcctgggaacgaaccctctatttaccaggatggtgactcccaggtcggtgcagtggaagggagtgaccacataggccccactctgagttgaggaggagatgaggccgccctcccggcctccccgacaaggtccacccatggttcgggggcatcatatacagcctcttggagtggtcaaagcacccctggaccttcactgggccaatactcagaatttttcagtccatatggtcgccggcagaggg

SEQ ID NO: 932 - DNA, 570 bp, Homo sapiens
taaggtagaaggccagaactttataccagtagcacatgatccagcataaaggcagtcttgaaatactgcattatccagggacagggcttcagcagctgatctgtcacacaccaggtgtcccacgtaggaatttcttaaaccacaggtaggatgtagctgcagagagtccataccaggtcacgatgtactgcagatgctcgttcctcagagtaactctggtttgccctccaatgggtcctccagggactgtgctctggaagttggcatcaatgaagatgggctctgcgcctgtgattctggccatagcttccaggtctcgataatgccagtggttcctttctggattgttctcagggacaaaaggctgcctggtttctgtcagcctcaccatcccaatgaggtccacttctccctcaatctggcctttctgccgggtttcaggattcactttcttcctgggaacgaaccctctatttaccaggatggtgactcccaggtcggtgcagtggaaggagtgaccacataggccccactctgagttgaggaggagatgaggccgccctcccggcc

SEQ ID NO: 933 - DNA, 437 bp, Homo sapiens
ttttttttaaaaaaaaattaaatatttttattatatacttttaaacatatagaagatagaaaaaaacagtacaatgaacagccatgtccaccagttagattctgtaacattttgccacatacgcctcacatacattttgttaaaccatttgaaacattttaagacactctaacacttcattcctaaatgcttaagtatgcaaattaagacagtcttttataaactacaacacccttctcacagctcataaaattaccaataattatccaatatcattcaaaatctaatccacattcaaattttctcaactgcctcaccaccgtgctggcctcccacccccacctcagtcttttacagatggtttttcaaaatagagtccagtaaaatatttcacattgcatttggttattacataacttttaatcaagaagagttac

SEQ ID NO: 934 - DNA, 286 bp, Homo sapiens
acaacaagccaacacatatgctttatggttctgtttcaaaaacatgaaaacccaggccctaggattcaagtgatggtgtgaggcagaaaggatggagaagttgttggcgccacgatgggggcaagcagccagacctcaggccctcactctaggcttcaaggtggctgggcttgacttctggccaagggctgcttttcccgcctgcgccctacctgaggccagaccttgcctgaggaaagggcctgtggtgggggggaagctcaggcagaaggaagacgtggccaac

SEQ ID NO: 935 - DNA, 421 bp, Homo sapiens
tgaatgaacaactgtgccttgtggaatttttgcagaagtgtttatgctttgttagcatttcaacttgcattattataaagaggtattaatgcctcagttatgtgtttgtcaatgtactggctgaggattctatctcagctgtcttttctaactgtgtaggttgagttttgaacacgtgcttgtggacatcaggcctcctgccagcagttcttgaagcttctttttcattcctgctactctacctgtatttctcagttgcagcactgagtggtcaaaatacatttctgggccacctcagggaacccatgcatctgcctggcatttaggcagcagacccctgaccgtcccccacagggctctgctgcacgtcctcatctcatttggctgtgtaaagaaatgggaaaagggaaaaggagagagc

SEQ ID NO: 936 - DNA, 527 bp, Homo sapiens
ttttattattaatgccttttaattttaatgtttcacattgttttgttttttttcagaagatttgtaacaaaaatacatggaacttagtatatgtttcaataaaatgggtaaatacagaatctgaacaagacaagtctataagatataatccttcttgtggggatagaacattccactccactaagaaaagagaatcacaacatgattaggcctgattatctcataccgcctactgttctaatttcagagactggtggacttggagaaaaaaacaaattaaaaataaataaataaaactgaatatggtcaactgcctcaattgctctctccttttcccttttcccatttctttacacagccaaatgagatgaggacgtgaggcagagccttgtggggacggtcaggggctctgctgcctaaatgccaggcagatgcatgggttccctgaggtggcccagaaatgtattttgaccactcagtgctgcaactgagaaatacaggtagagtagcaggaatgaaaaagaagc

SEQ ID NO: 937 - DNA, 542 bp, Homo sapiens
tttttttttagcacttggttattttatttcctcaaaaataaaacagaaaggaggcggggcccagctcagcaccaggtgggcagctcggagttgtggcctccctcctccagggctcgcctccgcctttcctcccgcccctactggcagccaacaagtcaacggaattcctggcctttgagatgtcaccccaaatgccacctgagttgagtgaagaaacactctcttggtgaaagcagaagcggactatccaggccaggcattgctggtggccggcatcacctgagctcgcctgtgtcctgcccagcttcagtgggtcttcccccggccctctgagatgacatcctcgggccgggcgcgcatgtaccactccacccaggagccatcgtagatgggcacgtctggcttgccgcagaggtaggcccctagtgccacgtggcaggctgtgacgccagagccacacgtggccaccagtggcttagacaagttcactttcttctcctggaacaagatgcggatcttctcaaggctcttttccaagcccc

SEQ ID NO: 938 - DNA, 389 bp, Homo sapiens
ccagtccccgagatcctgaaaacttcccatttgttgtgttgggaaacaagattgacctcgaaaacagacaagtggccacaaagcgggcacaggcctggtgctacagcaaaaacaacattccctactttgagaccagtgccaaggaggccatcaacgtggagcaggcgttccagacgattgcacggaatgcacttaagcaggaaacggaggtggagctgtacaacgaatttcctgaacctatcaaactggacaagaatgaccgggccaaggcctcggcagaaagctgcagttgctgagggggcagtgagagttgagcacagagtccttcacaaaccaagaacacacgtaggccttcaacacaattcccctctcctcttccaaacaaaaca

SEQ ID NO: 939 - DNA, 308 bp, Homo sapiens
aaaatcattttattggctctcttttaattaactccttcaaatgcacattgtttaaaaactgactaggtcaaaaatagttacgcctgcaggttgacctattcggactttgccaaactcctccaagttcaatataaattgacgttttcagagtacaaagtcaattttacggaaacgctgttcctccttttccatggagccaatctgggtaattttttcattaaaattcttcttctgcctgtttgctgcggaactctttgagctgctgtagccgctcgatagtttcagaaatggtgcgttccccgtggacc

SEQ ID NO: 940 - DNA, 216 bp, Homo sapiens
  misc_feature (1)..(216): n is g, c, a or t
tgaatntaattttttcacattgttatttgtttattttgtacaagtgatgtcataagcaaggattttgcctgtgttctagattatctccaataaataaataactatgtacaaatatttngngtttacaaaatagangaggaaaacctttgtcttacaaaagttacatttctatgatacatttatttccatacactgaggcagggntttcattcctag

SEQ ID NO: 941 - DNA, 402 bp, Homo sapiens
  misc_feature (1)..(402): n is g, c, a or t
aacacctcccaggagacagttcaagaaagcttcaaactgcatgattcatgccaattagcaattgactgtcactgttccttgtcactggtagaccaaaataaaaccagctctactggtcttgtggaattgggagcttgggaatggatcctggaggatgcccaattagggcctagccttaatcaggtcctcagagaatttctaccatttcagagaggccttttggaatgtggcccctgaacaagaattggaagctgccctgcccatgggagctggttagaaatgcagaatcctaggctccaccccatccagttcatggagaatctatattttaacaagatctggcagggggtgtgtctgcttcagttaatttgagggacaaccatttccagactngtttccant

SEQ ID NO: 942 - DNA, 427 bp, Homo sapiens
tgtctttattgactttattttagtttttgtacataaagaaaaatcatgttcatatccatcatgaacaaaaacttaaaaaggcagaactagaagacacgtgtccttcaccaaagcaaatctgtgctaaaggttccaaacatttcaatttttaaaataaatattttcattttccgatgtctactttcatgtcttcagagtgtcacaggaaatcgaagcctatcatgaattacaatttttttttagagtcccggctcactgtgtttggtaacttgccataccatatccggcttggttaggaggaggtattacagggggaggagcttgtccttggggaggctgagcaccaaatccacccatccaagcagcagaaggtggattgacttggaagaaaaagaaaaaatcttcagcaaacacaagagaaaaaaaa

SEQ ID NO: 943 - DNA, 467 bp, Homo sapiens
gttttattcatgctgtttccaggaagggatgtcagagctggaccagtcgaaacccttggaggctttttttgcagttggccacaggggcgttggaggcctgcttatgggtcctcgatgtcgagaaactcctgcttggggggcgccgcgcgcgttaccacgcacaggagccgtcacttctcttgatgcaggcgaagaacttggcctggtgcccgttgatgttcttctctgtgacccagtccatccagaggcactcgtccggggaggagatgtagcacgggatcatggggcagcgcgtgatcttgcactcgcagcccatctggtacctgtggttcaggctcttcttctgggtggtgctcagggtgtcccagggcacgatgaagtcacagagggtgatgtgcatcttgccgtccccctcggcctttcctgcaatgagatattccttctttcctccaacgtccagcgagacc

SEQ ID NO: 944 - DNA, 330 bp, Homo sapiens
gaagagattaaactattggcatatttaacagcattgaacagaattctgtgtcctgtaaaaaaattagcttatgtccccatgtgggtatatgcaaatgtgtatacaaacatatccccctaggtgagctaaacactattctggaaatagtatcctctacccaaatctacttggctatatctgtggatagtgtatggtgtgtgtatttatccaatttacataaaagaaagctcctggccaaatctaccaaagcgttttccaggaggaagtctggtgggaggcagggagaggaaagacattcatctcagtctttcacctgagcttttgtacaag

SEQ ID NO: 945 - DNA, 367 bp, Homo sapiens
  misc_feature (1)..(367): n is g, c, a or t
natctgcctgaggtcaggaggcaatttgctgccttgtacaaaagctcaggtgaaagactgagatgaatgtctttcctctccctgcctcccaccagacttcctcctggaaaacgctttggtagatttggccaggagctttcttttatgtaaattggataaatacacacaccatacactatccacagatattagccaagttgnntttggggtnganggttantaatttcccagattangtgtttaggctcacctagggggggatantgtttgtatacacattttgcatatacccacatggggacataagctaactttttttacaggacacagaanttctgttcaatgctgttaaatatgccaatagttt

SEQ ID NO: 946 - DNA, 446 bp, Homo sapiens
gatagaaataaaaccactttactgtttagaataaaggacacactataaaaagtgaacattatgcaacattacaagacaatatacattcacggaatataaaattcataaataacatggaggaaaactgtaaacagtgctacgaaatttagcaacaaatacattccttctagacagggttcgagatctcttgttggtttctctccatcacttctgggtttcaggacagcagactggctaaagggaaaggcggatgctgggagaatctaagaagcctctacccccaaagcaaaaactattctccaagttctccccttcctctcgcctccaaagagccaatttggaagttgttgtcacatccacctccccctatttccattttgttttgcctttgccatcagatttttaaaaatgtttggcctctcataaaaatactctagtggcatgtt

SEQ ID NO: 947 - DNA, 576 bp, Homo sapiens
  misc_feature (1)..(576): n is g, c, a or t
attcggcacngagggttcttgaacaattaaagaaacaaatgactttttggaatagccctgtctagggaatgctgtggcccccaggagacactacccttccatgccccagacctctgtcttgcatgtgacaattgacaatctggactaccccaagatggcacccaagtgtttggcttctggctacctaaggttaacatgtcactagagtatttttatgagagacaaacattataaaaatctgatggcaaaagcaaaacaaaatggaaagtcggggaggtggatgtgacaacaacttccaaattggctctttggaggccagaggaaggggagaacttggagaatagtttttgctttgggggtagaggcttcttagattctcccagcatccgcctttccctttagccagtctgctgtcctgaaacccagaagtgatggagagaaaccaacaagagatctcgaaccctgtctagaaggaatgtatttgttgctaaatttcgtagcactgtttacagttttcctccatgttatttatgaattttatattccgtgaatgtatattgtcttgtaatgttgcat

SEQ ID NO: 948 - DNA, 921 bp, Homo sapiens
  misc_feature (1)..(921): n is g, c, a or t
tgcacttaattacagtagtttatagtttacagccattggacaaatttacttctttaaaagaaatctcaagatcatttgggatgggggcaggggagggagtctgtggatatttacagtgtgtttggctcagttcaacagcacatgtccttctctcctcatttcagtaacagattcaagttttcgcatcagtttgttcgatgaaggatcacaacatagacagtacggctttcttgcttcctcttcggtggttccttgtctcccacctccaggacagacaggagtccttgacatcgtgggagaggcattgtggcaatactgcatagaagggaaactgggcttcgggctgcgctcctgagagtggattgtctgaggtgccagcaggacgtccgtcaggtaagcagggacctctcgcaggtgcctgtcaggtcactgggcttttccatgacagctgcccagagggtgatggtgtggcaaacagggtccttgttgttgcgcacgaatanagtggtgtgtgggcatcaccaggcttgtagaggacactgtttacttgaagacatgttggtgagtgtactgatgctgctggtatctgtgacaccattgcagatggaaccgggagtgtcgggaatactgggggggttctgcttgtgtgcgtacatgtgtgagttctgcagctgagtcacagctgccatgaagggctgctgggccatgtggctgcctgggctctgctgcatgaaggggcttccggttaaaggcctttcagctgctgggagaaactggaacggctgcagggctgccaggcttgccggcaacactgttgattgacagggacactctgtgctttggaagttgtggaggcttgtgcaattgccatgaccccaaaaaagggtgtcatgatgaagttttcgaaattgcgggggaata

SEQ ID NO: 949 - DNA, 541 bp, Homo sapiens
tttttttgtgtttcaacaaactttatttatgaacactaaatattcatgttaattttcaagtatcataaaagtctttaaaaaaaaacatttaaaattataaacacaattcctagctcacaggccataaaaagcaggcagcaggctggatttgatccacaggccatagttggctgtctcttaaacaggcttttatacgttatgcaaagtgtttcaaattccagagactttggagacttttcgttttttagatttctcattttaaaacacacataatacaagttttctttctggatcaatatactcacgagagaaaataattcagaaaaaaataaaattccttacttaaaaaaagggaaaagctatagaacaaatgtttcgtcttaaaatatatttaggaaatgtaaaattaaagattaaaaattttattctatgcaacataaaataatatgcataaatctggcacataatttctttgtttttactttagaaaaaagacagtaagaaaaaagtttataaatttctcagtcccttttatacaaag

SEQ ID NO: 950 - DNA, 598 bp, Homo sapiens
ataacacacgctggagtgtcgcacgcgggttccagttgtgattgctggagttgtgtattgccaggaggtctccgagattggggtcgggtcactgcctcatccaccggagcgatggcgtttctccgaagcatgtggggcgtgctgactgccctgggaaggtctggagcagactgtgcaccggctgtggaagtcgactgcgctcccccttcagttttgtgtatttaccgaggtggttttcatctgtcttggcaagttgtccaaagaaacctgtaagttcttaccttcgattttctaaagaacaactacccatatttaaagctcagaacccagatgcaaaaactacagaactaattagaagaattgcccagcgttggagggaacttcctgattcaaagaaaaaaatatatcaagatgcttatagggcggagtggcaggtatataaagaagagataagcagatttaaagaacagctaactccaagtcagattatgtctttggaaaaagaaatcatggacaaacatttaaaaaggaaagctatgaccataaaaaaagagttaacactgcttggaaaaccaaaaagacctcgttcagcttataa

SEQ ID NO: 951 - DNA, 389 bp, Homo sapiens
tctctctccccttgtcagttacctctgttatcttggacctgctgaagcagtgagctgggtggtcctaacacgcttcacctttgtctcttctggactgcaggaggcggcagacggctaccagcgctgtatgatggcgcagtacaaccggcacgacagccccgaagatgtgaagcgacgagccatggccgaccctgaggtgcagcagatcatgagtgacccagccatgcgccttatcctggaacagatgcagaaggaccctcaggcactcagcgagtacgtagagtcagagaggcggccttgctggaaatggagaacaaaagcaggcagatgagtgcacgcggctggggggtggtatgctcagtctgcgaggaagaggaattctgtcattc

SEQ ID NO: 952 - DNA, 467 bp, Homo sapiens
agggcagcggtgaagagaccatgcgtgtgctgggagggcccagaggcagcggcggcacaaacagcgcaggtacgagtctctgtgtcttccccggggttatgtataaatatagagagatgaggccttctctcccctgctctcccttccgctccgtgctgctcgccgcggtcccagctcctctttccacatgagggcgaagggaaggggggatgaacaagtcatcaccgaattgcaatcagacccacatccatcagcttctggatcttctgtgctattacaggattctttaagtgtctacagaggaagacgcagttacttgaaatgagacaacctttaaagtcttacttgctctcagagcaagccccaattcaaccccctctacagaaggccccggcagggaggggtcctggcgaggcccggggcgccgagctgcagaggcctgctccacttcgcagaacttgccagtc

SEQ ID NO: 953 - DNA, 504 bp, Homo sapiens
ttcgaatcttatatagcttttatttcagtgatcagaagaatgcagtaaatggaatctacactaactaacattaggcatgcacctctacctgaaactgctgttagcttctgattggcctaaatctttataacttatttaggcacatcactgaattttttgtaccctgatatacagggtaagttaatttcttccttgtggcagtctagtaataagaattatgttcactggctagattcctttataactaaaggcctctagactctcaggctgcctaccctaccttgagacttacttaatatggatatttaagcaaatcatcatataggaaagggagatcaagataactgaagtgtactgtataaacactcttacagatatttttctccagcattgacaatcaaacactagataaggataccaaattattcttcccctacttctgccctttctgataaacacaaggatctcccctgaaatcagaaatgactccacacaaatgagaga

SEQ ID NO: 954 - DNA, 452 bp, Homo sapiens
gcactcgccaattaagagatggaccagccagcagtcaagtgcattctccagtccttgcaagaaggatcagccctttctgtgccagcctcgatcgccttgtgctttggtctcttctaaaatgtggtgacctggaagaagaactcaagaatgttactaacaatctgaaatctctggaggctgcatctgaaaagtattctgaaaaggaggacaaatatgaagaagaaattaaacttctgtctgacaaactgaaagaggctgagacccgtgctgaatttgcagagagaacggttgcaaaactggaaaagacaattgatgacctggaagagaaacttgcccaggccaaagaagagaacgtgggcttacatcagacactggatcagacactagacgaacttaactgtatataagcaaacagaagagtcttgttccacagaactctggagctcgtgggt

SEQ ID NO: 955 - DNA, 222 bp, Homo sapiens
  misc_feature (1)..(222): n is g, c, a or t
ttgtgtgaagcagctttgtagttttattcaatgttgaaactaaaatgtcaataaataagaagtaaaaagaatagcaaacagaaatagcttacacagtgtttatttgacactgaaacgaagagcttctgtacaatagaaagcacagtgtgtgcctggctctaaggnaggatgctaangagagagaaccagggtcagctgggagatangncaattgcggagctc

SEQ ID NO: 956 - DNA, 422 bp, Homo sapiens
  misc_feature (1)..(422): n is g, c, a or t
ctcgggntcgagtttgcggagaggtcagtaactaaattggagaaaagcattgatgacttagaagacgagctgtacgctcagaaactgaagtacaaagccatcagcgaggagctggaccacgctctcaacgatatgacttccatataagtttctttgcttcacttctcccaagactccctcgtcgagctggatgtcccacctctctgagctctgcatttgtctattctccagctgaccctggttctctctcttagcatcctgccttagagccaggcacacactgtgctttctattgtacagaagctcttcgtttcagtgtcaaataaacactgtgtaagctatttctgtttgctattctttttacttcttatttattgacattttagtttcaacattgaataaaactacaaagctgcttcaca

SEQ ID NO: 957 - DNA, 433 bp, Homo sapiens
  misc_feature (1)..(433): n is g, c, a or t
ttttttttggtcttgatagatctacctttagttttgtcattttccagtattcacaatcctttcaaagtttcctttaaaggggaaaaaacagaggcttgtaagaaatatgctcaaagaggttctaggacttacagacatcccattccagtataagatacaaaaggcaaaatgtttcctttacccatgatccaggctagctccaagantcctaaaaacgatgttttaatttggaatctgggatggggcgttttgtggattaacatgtgttctgacacaaggactactctacttccttaagaaacatgaggcaaaaatgctttgctcaacaacctagttatgtatgtacaaatgggtgatcatgggtccttactgattaaaaaacttataaggcaatttctgtttacaaaatcgnttcttggcttaacngggtctt

SEQ ID NO: 958 - DNA, 276 bp, Homo sapiens
  misc_feature (1)..(276): n is g, c, a or t
tgtcattttacacatgaggaaagtgaggctgagagaatccaattagcttgtacgatatcactccataagagaagcaaatctgagagtaaaacccttaccccttattcttaagaatagtgcttgtttattcagtacaaaaaaaatgctgaaaggcagcgttttttagactctaaacattctgattttgaaggtnggtgttgggaacgactgatgatgttttttatatcatncaattcagccatgggatgcgancttaaaatctggggtttcacaggg

SEQ ID NO: 959 - DNA, 169 bp, Homo sapiens
atgccttcttgatttattttttgttgttgttgttcacagcattttgttgatgggatttggaacactgtcgtatttcaaagctacaaagcaatattcatcaaataaagccaataatcagctataccaaattaaatgtcccaaaactataactttttctttttaggaaagc

SEQ ID NO: 960 - DNA, 402 bp, Homo sapiens
gcggaaacgcgtcacgcacgcttcatccgggcacttcataagggatccgcagctgctcccgctctccagaaagacagcaagaagcgagtattttccggcattcaacctacaggaatcctccacctgggcaattacctgggagccattgagagctgggtgaggttacaggatgaatatgactctgtattatacagcattgttgacctccactccattactgtcccccaagacccagctgtccttcggcagacatcctggacatgactgctgttcttcttgcctgtgcataaacccggaaaaaagcatccttttccaacaatctcaggtgtctgaacacacacaattaagttggatcctttcctgcatggtcagactacctcgattacaacatttacatcagtg

SEQ ID NO: 961 - DNA, 108 bp, Homo sapiens
attcactaaaataaagcatctattagtgtctgatttaggaatgtaaaatgattctgtattaatgtaaataagattatctattgcaaaaagatatttcaaacctaaaaa

SEQ ID NO: 962 - DNA, 113 bp, Homo sapiens
ttttttttaggtttgaaatatctttttgcaatagataatcttatttacattaatacagaatcattttacattcctaaatcagacactaatagatgctttattttagtgaatta

SEQ ID NO: 963 - DNA, 391 bp, Homo sapiens
gagatgaggtctcgctatgttgcccaggctggagtgcagttattcacaggtgcaaccacagggcactgcagctttaaactcctgggctcaagcgatcctcctgcctcagcctcccaaatagttgggactagatgcacgcaccaccacgcctgactcaggacattattcttaaaggtattatccaggaaacagataaggtcattcataaaacacacggctttttttctttagctcagtgttaacaatgaaagtagattccactattgaagcacaagttgcaaattggtaacatagtgaacatattgctgtaggaaagtgggttcagtgtggtgtgttatatgagcacttgaacttttcaaggtgtcataagccagttatctgccacaaagaa

SEQ ID NO: 964 - DNA, 350 bp, Homo sapiens
gaaaagtccattcataaaacttttattccacttacatgaatttaatacacgtgttcttaacaattatgcttggattgttcatgaaaatttcataagacattaaacaaagctagccatcatctcaagttatttccctgttaactatttttacagcacatgcatgttaggcaagtatcaaaaaaaaaaaaaaatcacaaaagcaaaaatcctaaaaaaaagttaaatacatgggtttttgttttactgctgtgcttgatatacatgaagtaatgaataccaagcaattcatttttcctgcatctttacttttacatttgttcttaggttcgcctaaaacatttaaatacaaa

SEQ ID NO: 965 - DNA, 337 bp, Homo sapiens
  misc_feature (1)..(337): n is g, c, a or t
tannaccctttttaangtttttaattaatcagtcacttgtaaaagcaaacaagcggtccatccccttttcaaggtcacttttttgatggtaccgaagatcccatggacattaagggacagctaactgtggccagactcagccccatgtccttggccaggcccaaggagaggactcggccccatgggttntgccagtnttgcagtccgccccacctgagtagcgtgancagatgacgccacagaganccgtctcttccctgaacgcgggtcgnttgtgggaatcagtgactgctgactcagggagctcctttggccncgtgggaanttgttgccaggg

SEQ ID NO: 966 - DNA, 385 bp, Homo sapiens
  misc_feature (1)..(385): n is g, c, a or t
ttttttttagcaaaaatgtttaatctctccttaatgtgtgtgtttatttacaagtactaaatctgaagaacagtaaaataggaaatagcccgtatatgtacacatctgagggccgggccacagtcagcggtgctgcttctgcaaagagcccggctgagggtgcccgcccggaccgtccgagggatcgctcttcttctgggagggggttctgcggtgttaaaggacagctaattgtgggctttgtcttaaaaatatctctctctctaaatatatctattctagctgtgtagcaccaacgtgagccactgaattccagacaggggagaaggccngggccggaagnttctcagcaaggcccgagccaggatggcacgccgttccgggt

SEQ ID NO: 967 - DNA, 497 bp, Homo sapiens
ttttttttttggaattcaaaaactccagccattacaatagacatttatttaaagtaaaacatcttcagaccaaataattcttaaaattgtttgtttcaagtttaaccatcttcataacagctgcatccacagacttcaactacatgattacttctttgcccattcttctctttcttttctttcccgaataacctctttcagatacggttcaaggtagaaattttcctcttcatatttggtccactgctctttaggcaagatctgatgcttcaagttcaggtccagtgccctcttaatgcgaaacatcctgtcattataaaggttctcaggaagtcttcttatggcttcttttacatcttcatcctcgtatattgtatcatctcgcattaaccccagtttattgaatcctgcagcattgtaataccattttcgaataccatccagccacttgcctgatgctgaaacggcctgcttaccagccattttgaccagaaaga

SEQ ID NO: 968 - DNA, 659 bp, Homo sapiens
acacttaaacagaatgttttattgactttaggtcagctgggaataattacctgcatttatgccttattttacctcactggaaaaaagacaaatgatatattagagacttctgactttcatgtgtttgctgctctgggctgagagaacgttcagctctctcctgtaatgtgtgcatcagtattacaactcatcaacaaaaggtgtatgtcccaaatttccacttgctgccattgacttctggccagaaacaaacttctttgccgcatttatgatatcagcattagccactgaatcaatctgctgaaggactgtggatggtggcatgtaagaaccagcaactagagcctgggacccgacttcttccaggaaacactcagaagactccactgacattaggtatccagctttcagcttgttcttggcagcttggacatctgtgttggaaaggtttccttgagctattgtttttacttgattataggcagccttgataacatctccagcagctgtggcctgggagatagtataaatccaaagagtcaagatctgagtaactggcattaaatgcagaaacatcaaattgctgctgagtttcttgcgacagcctggtgcagatggctgttgtgtttcttgcctcctttgcattgtgcccggccccg

SEQ ID NO: 969 - DNA, 455 bp, Homo sapiens
tttttttttttttttttttttttgtacaccagtctgtaatttttaattagaattagctaaaagacattgtacctttcgcgtgtatgactgagcataacagtgcttaacagtgtctttattaagtgaatgcctgaaagtattcaacattaaattcaatttatttcacattaatgtttgcaaatacatcatcaattcttacatatttcaaatcaacttcaagtacagaaggcttcctctcaaataagtctcctgaggtgacataaagactgaaagaagcctatgacttgagtccaagtctcttaaccaacaatcaccatatcgtcactggtgaactcatacgtggggacttcaaggttgagaggagcaggacccaatctgatcctgccagatgcatcatagtgtgacccatggcaagggcagtaataaccaccaaaatctcctgcatttgcaatggg

SEQ ID NO: 970 - DNA, 490 bp, Homo sapiens
ctcgccggccctgctgcggacgccagccttgcggagtacggcaaccgtcgctcaggcgctccagttcgtgccggagacgcaggttagcctgctggacaacggcctgcgtgtggcctccgagcagtcctctcagcccacttgcacggtgggagtgtggattgatgttggcagccgttttgagactgagaagaataatggggcaggctactttttggagcatctggctttcaagggaacaaagaatcggcctggcagtgccctggagaaggaggtggagagcatgggggcccatcttaatgcctacagcacccgggagcacacagcttactacatcaaggcgctgtccaaggatctgccgaaagctgtggagctcctgggtgacattgtgcagaactgtagtctggaagactcacagattgagaaggaacgtgatgtgatcctgcgggagatgcaagagaatgatgcatctatgcgagatgtggtctttaac

SEQ ID NO: 971 - DNA, 294 bp, Homo sapiens
  misc_feature (1)..(300): n is g, c, a or t
agcttgctttatggatgacaagtgggctaggctgggctgtcgggggcaggacgaagattctggctgaactttccaagggacgggacgcttgggancctggctggtacgaggcctcccacactgtcaaatgtcaactccaccagcactgagacaatgagtagatgagaatgtagaaagagggaaggtggtaggtaaaggagcggaaggaagaggtggggaaanagggaagganagaagggaagganggaagagaaagaaggaagaaaaggaaagcatngccccgctanagacaaa

SEQ ID NO: 972 - DNA, 372 bp, Homo sapiens
  misc_feature (1)..(372): n is g, c, a or t
cgagatacatgaactctgccctgggcagtacagtagcgctggccactgtgcccttaccatgctccagaaggaggggccccgagccttctacaaagggttcatgccctcctttctccgcttgggttcctggaacgtggtgatgttcgtcacctatgagcagctgaaacgagccctcatggctgcctgcacttcccgagaggctcccttctgagcctctcctgctgctgacctgatcacctctggctttgtctctagccgggccatgctttccttttcttccttctttctcttccctccttcccttctctccttccctctttccccacctntttccttccgctcctttnacctaccacctttccctctttctaa

SEQ ID NO: 973 - DNA, 484 bp, Homo sapiens
  misc_feature (1)..(484): n is g, c, a or t
ttttttttgttcttactcccacacctaaggtggaanttcttttattgagtcataataatttcccgagaattccgagtcctgctactttaggttcttgcccaggaatccacctcttttcccccaagcccaacaatcctttgaggtactcatgattgagcgcgtggtgggggggggtggggaagaggctgcatgggggtggggctcctgtggcttcacgtcatccactgtcacctctggtccccaagtctctggatcctttggtctcacctctagacaaccggcggggttcaaaccttcttccctggcaactcctctctgtcccgacaaaatctctcccaaggcattgtccttgtagttagatttacacagagcttttgcttttataaagtgcgttcatgcccagcttctcacttgcatgtcatagcacccctggtgaggtggacagggaagggatggctccctccattttgtaggaaagtngggg

SEQ ID NO: 974 - DNA, 404 bp, Homo sapiens
ggtgacctacgacatcctcaaggagaagctgctggactaccacctgctcactgacaacttcccctgccactttgtctctgcctttggagccggcttctgtgccacagtggtggcatccccggtggacgtggtgaagacccggtatatgaactcacctccaggccagtacttcagccccctcgactgtatgataaagatggtggcccaggagcgccaccagccttctacaagggatttacaccctcctttttgcgtttgggatcctggaacgtggtgatgttcgtaacctatgagcagctgaaacgggccctgatgaaagtccagatgttacgggaatcaccgttttgaacaagacaagaaggccactggtagctaacgtgtccgaaaccagttaagaatggaag

SEQ ID NO: 975 - DNA, 448 bp, Homo sapiens
  misc_feature (1)..(448): n is g, c, a or t
attacaatagacatttatttaaagtaaaacatcttcagaccaaataattcttaaaattgtttgtttcaagtttaaccatcttcataacagctgcatccacagacttcaactacatgattacttctttgcccattcttctctttcttttctttcccgaataacctctttcagatacggttcaaggtagaaattttcctaaagaatgaatgaaatattatatgttaccatcacgtactgatatatcccaaacactcaacagggtcttcaataacaagaaaaangcaattacttttgaatttccaattttnggaaaacatattctcaacctaggganctatctgctttttaaaatgtcaaatctgtgggngatgggngtggtaagttgctttggtagggtatgaggggggaggcttttcggggaggnaaaggnatggattgtccccggcct

SEQ ID NO: 976 - DNA, 515 bp, Homo sapiens
  misc_feature (1)..(515): n is g, c, a or t
catcaggcaagtggctggatggtattcgaaaatggtattacaatgctgcaggattcaataaactggggttaatgcgagatgatacaatatacgaggatgaagatgtaaaagaagccataagaagacttcctgagaacctttataatgacaggatgtttcgcattaagagggcactggacctgaacttgaagcatcagatcttgcctaaagagcagtggaccaaatatgaagaggtagcacagctttatctacctgacagtgttgctcattaaggatggagttttagaaacaagagaaacatgttcatttgcatagtgttagagttctctgagtcatgtcaaataaatatgttgaggttaataaagcaaatgttnatttccgtttttagaagganaaccacattgagtcttacgtgttgaatggattcttctganatttactaaggcaagtctctaatatagtgngcccgggncttaaatccgggtctnttgcctcccgggnctttgctgttcccg

SEQ ID NO: 977 - DNA, 410 bp, Homo sapiens
  misc_feature (1)..(410): n is g, c, a or t
cccagtcaccgcgacgctcctcgggaagccataggggcctcccagcccgtctccccgctccagtttagaacctaattcccaattcccggaccgggcccagccctgggtcttactgtccgcttttgctgggacctgttccacaaatgggcgtcttctgccttgggccgtgggggttgggccggaagctgcggacgcctgggaaggggccgctgcagctcttgagccgcctctgcggggaccacttgcaggccatcccagccaagaaggccccggctgggcaggaggagcctngggacgccgncctcctcgccgctgagtgccgagcagttggaccggatccagaggaacaaggccgcggcccttgcttcagacttgcgggcccgcaacgtgcccgtgggtttttgggagag

SEQ ID NO: 978 - DNA, 408 bp, Homo sapiens
  misc_feature (1)..(409): n is g, c, a or t
tttttttttttttttttaacttttaacaaacttttattaacaaacctcgcgtagagccaactctaacccgactaacagcaaaaacagcattgctaacaagatcaaggatggaggtgcagacccaataaagaccgtctcttaaaaaaaggactgggaaaaatatatatatatatatctgcatgagtacttcttaaaaaactaaaactttccagtgttgcaggaaaaaatatcccaaagtgatttcagtcggttaaaaaaaacagtacttggcagtctgtgctgccttaaaaaccccaactggncataaccctaggnganaatcaccccaccccataaagncaaaattcccttttctcctcttccttgttcaaattccactgcttattccaccaacacccaaggntttaa

SEQ ID NO: 979 - DNA, 444 bp, Homo sapiens
tcttctactctgtacaacataagccctagaaagaccggactttttgttgctgttgttcatttgtgtttatgcttcatgcctgggtccatactagggatctgataaatttattgaatgctgaatacactgagtaaacatgcctacatatgcgttgtcactagtaaatagggagacaaaggcttgtggtcctcctgacctccctgttggtcccccagaggaatcgggagttggtgagcagatgtggatgactttggaccaatcgctacattgccaacctgggccatggctttatcctgacatggacccagaacatgtgggcgcctttgtggatgctgtgataaacactcacgtctgcttcgacagaactgagtgtatacctttaccctcaagtaccactaacacagatgattgatcgtttccaggacaataaaagtttcggagttg

SEQ ID NO: 980 - DNA, 404 bp, Homo sapiens
tttcaactccgaaacttttattgtcctggaaacgatcaatcatctgtgttagtggtacttgagggtaaaggtatacactcagttctgtcgaagcagacgtgagtgtttatgcacagcatccacaaaggcgcccacatgttctgggtccatgtcaggataaagcccatggcccaggttggcaatgtagcgatgtggtccaaagtcatccagcatctgcttcaccaactgcccgatctcctcctgggggaccaacagggcaggctacaggaggaccagcaagcctttgtcctccctatatatactagtgacaaacgcatatgtaggcatgcttctactcagtgttattcagtcattcaataaaatttatcagatccctagtatggacccaggcatgaagcataaac

SEQ ID NO: 981 - DNA, 283 bp, Homo sapiens
  misc_feature (1)..(283): n is g, c, a or t
tttttttttgagatcagaattaaattctttaatacaaaatgcttttttttttttaagatatatctgtatttctttgtcgttgtttaaaaataaatatgtactacggaatatctcgaaaaactgcactagagacaaagacgtgatgttaatatcttttccccacaattattacggataaacagtagcaccaataaataaatgataacaaatnttaaanttaaaaaaggagagagatttagtatgtagganttctctatttttncttgttttgtttttacatata

SEQ ID NO: 982 - DNA, 498 bp, Homo sapiens
  misc_feature (1)..(498): n is g, c, a or t
ccatgcagattatgcggatcaaacctcaccaaggccagcacataggagagatgagcttcctacagcacaacaaatgtgaatgcagaccaaagaaagatagagcaagacaagaaaaatgtgacaagccgaggcgntgagcgngcaggaggaaggagcctccctcagggtttcgggaaccagatctctcaccaggaaagactgatacagaacgatcgatacagaaaccacgctgccgccaccacaccatcaccattcgacagaacagtccttaatccagaaacctgaaattgaaggaagagggagactcttgcgcagagcacttttggggtccggagggcggagattccggcgggaagattttcccgggcgggttgacccaggcntggtccnttttnggatttngggttttcgccnttttatttttttcttggnttgtttaaattcaccngaggcccggaagtttaggaganttttntttttttgggtttcccttagatt

SEQ ID NO: 983 - DNA, 715 bp, Homo sapiens
gaggtttcaatattttattcaagttttttaagtgttgttaattacagcatttgaaggggaggatctaattccaacaaaatggaagactctaaaatgtacccattaaactgctaaaaaacaaattgagtggtgagaatacaacagaagtccaatttagattctgagtgttgtcaccatgtgattacaatcacacagacacttccaagcttatagctggagctcctggaagctatttcatactctggtgcaagggcaaaaaaaaaacacaacacaagaaggaataagtcctgaattattggcttcatcacatccaccttctccaccccaaaatggcacaaaagaaacagttaccacaccctgcagaccttttggtgtaaaagagatgatgatgaactggggtgggaacaggtcatgaagatctgtctaaaaaagtcccattcaggtgagtttgtacacaccatcaagcagcgagcctctcatcaattagggttagggaaccaaggttcgattctcaggaaatcacaatttcattcatttactcaatatgaatttacaaagtgcctacatattatccgctttcacttgcagccatttctagataaaaaagaaacctggcatctcaaaggggccaccaagttctccccgagtctaccactgaaaggaccttttttgaaataggtttcttctgtacctctgaagggtaaacatctaaagc

SEQ ID NO: 984 - DNA, 357 bp, Homo sapiens
taatggtaacatcttaaagctgaatcaactttaacctggagggctaacatatttagcaatacttgcatcccagacatacaacattaaaagatacactaaattctgaaggtagctatgctgcagaatagtttaaaattaaacaattgtacagtattcatttatgcttgaaattccagtcctagaccaagcttgtggccaccagcattgacgttcttgccatccagaagagctgacagtgtcagtttaatacctggctttagagtctgagtgtatcctaaacctatcaggctggagttgttcactttagccgagaagcaggcgtcagggtcaatctgatacttggctgctattccgaag

SEQ ID NO: 985 - DNA, 341 bp, Homo sapiens
ccattttggggtggagaaggtggatgtgatgaagccaataattcaggacttattccttcttgtgttgtgttttttttttgcccttgcaccagagtatgaaatagcttccaggagctccagctataagcttggaagtgtctgtgtgattgtaatcacatggtgacaacactcagaatctaaattggacttctgttgtattctcaccactcaatttgttttttagcagtttaatgggtacattttagagtcttccattttgttggaattagatcctccccttcaaatgctgtaattaacaacacttaaaaaacttgaataaaatattgaaacccctccgtgcc

SEQ ID NO: 986 - DNA, 350 bp, Homo sapiens
ggtttcaatattttattcaagttttttaagtgttgttaattacagcatttgaaggggaggatctaattccaacaaaatggaagactctaaaatgtacccattaaactgctaaaaaacaaattgagtggtgagaatacaacagaagtccaatttagattctgagtgttgtcaccatgtgattacaatcacacagacacttccaagcttatagctggagctcctggaagctatttcatactctggtgcaagggcaaaaaaaaaacacaacacaagaaggaataagtcctgaattattggcttcatcacatccaccttctccaccccaaaatggcacaaaaaaaacaaaaaag

SEQ ID NO: 987 - DNA, 494 bp, Homo sapiens
cacagttttcataaaggtctatttcattattggtgggtagcgcatttaacagttaaatacatttaaataacgtataggtgactgcaggactgcagcagttggtaactagataaccaactagaaaccagctaacaaagaactgtctaaatacttaaaatacagctcttgttgagatcatcctttgttttgatcatcttcttgggggaaaaaagcctgctgctggtcacaatggaaatatattaaggccaaatcttctgatatccattcccaaaggtttctttcagctggattaagcctccaactccagggcgagccaaccttgtggcctccagcattaatgctcttcccatctaccagagcagagagtgtaagcttcacaccaggcctcagagtctgagtatagcctactccaattaagctagagttgttgacttttgcagaaatggaagcagtgggatcaactgatatttagctgcaatgcaagacgagtgcag

SEQ ID NO: 988 - DNA, 346 bp, Homo sapiens
tttttatgttccaaatgtgatgggtttattttattttactatgatgcaaaaccaaagattccactatagcacagagaccagtatattacaaggtcatgaaaaaatggtgtgggacatgcaggacgtgatgtacaaactggtgggtcagatcgtctcctctaacatgacgctacactgtcgctgaggaacacatttaataacacttcagaactgaactgaaacgtggcacaaacatgacaacttccaggcatgccttcaagcgtctccctcaggagggattcgcaacccctagacttcagtgtggggaggattacaattctttggaagaataaaaagttcacacttt

SEQ ID NO: 989 - DNA, 491 bp, Homo sapiens
gtcaaattgactttatcagctttaatcgatgggaagaacttcagtgcaggaggtcacaaggttggcttgggatttgaactggaagcttaatgtggtttgaggaaagcatcagatttgtccctggaagtgaagagaaatgaacccactatgttttggccttaaaattcttctgtgaaatttcaaaagtgtgaactttttattcttccaaagaattgtaatcctccccacactgaagtctaggggttgcgaatccctcctgagggagacgcttgaaggcatgcctggaagttgtcatgtttgtgccacgtttcagttcagttctgaagtgttattaaatgtgttcctcagcgacagtgtagcgtcatgttagaggagacgatctgacccaccagtttgtacatcacgtcctgcatgtcccacaccattttttcatgaccttgtaatatactggtctctgtgctatagtggaatctttggttttgcatcatagt

SEQ ID NO: 990 - DNA, 372 bp, Homo sapiens
tttttttttttttttttttttttttttttttcttctttataaacacaagtacatgaggtttatttgaaattccaatttattacaagttcaccctttaatggggcccttcctctttgaagacaataaaaaaaaaaaaacaacaacaaacaattcaggtgtcactgaagtgggaacacaggattctcactatgaacaagaacagactggatgtaggaggcaggggaagctggcggtggtggggttatgaagctgtgatgtcagtgccaactccatgcctatagaagggacggtaaactacccagcagccctggagcaatcctcgtcgtccttgggcaggaggacggaggaagcagaggccacattccgcagttt

SEQ ID NO: 991 - DNA, 318 bp, Homo sapiens
gtggggggtgggaggagagagcggcagagaagctctgagagccccttcccccacaacaaatctagctctagttgttatatttaggcaaaactttgtagtcttctttcccttttatgatggattttgataaaagtacaaaacagggtttttcttttttatcacctttgaatttggaaattttgagcacccaagctcttctgtacctatttaaagtccaccaaggggactgcagctcctagaacatgagaatcaagcctcttaattttaaactgcggaatgtggcctctgcttcctccgtcctcctgcccaaggacgacg

SEQ ID NO: 992 - DNA, 548 bp, Homo sapiens
taaaataacaatgactctttataaacttgtatggggtctaaattatcccttgtaatatatatgtgtgtattcattccacagagaattagatgatccgcctccaggtaacctgctgggaatttcttgagattttggctccccttgaatggccgcatccaacttgttttgttagaactcccagcatcacagcgatggcagctctcttagattccccatacatccacgacctatatcatgtccaataaatcgtccacatcaccaccttcttcaaatacagctgctgtgtctccacttggtttgtctttgggggccagaaactttttggcttcctcagctgtgacagaacttccagaggcttcctcttttggtgatcagagtatttcatccctggacaacattttccagaaatgatttaattggtttaattttccactttcactggaaagggcttacaggaggtggttaaaggctggcccttcggaaaactaaagggttttccccggaaggctcggggggagttagtgctctacaaaaaagagggggttcat

SEQ ID NO: 993 - DNA, 455 bp, Homo sapiens
gaagaagcggtatcttcaagcagcaagtaacaacagcaggtaatatgcgctgaatgtgggtaccatagcttctcagccttctgtaacacaagcagctgtggcaagtgtcattgatgaaagtaccacggcatccatattagagtcacaggcactgaatgtggagattaagagtaatcatgacaaaaatgttattccagatgaggtactgcagactctgttggatcattattcccacaaagctaatggacagcatgagatatccttcagtgttgcagatactgaagtgacttctagcatatcaataaattcttcagaagtaccagaggtcaccccatcagagaatgttggatcaagctcccaagcatcctcatcagataaagccaacatgttgcaggaatactccaagtttctgcagcaggctttggacagaactagccaaaatgatgcctatttga

SEQ ID NO: 994 - DNA, 616 bp, Homo sapiens
tttttttaccaaactaaacataaactttttttgtagttaaatgcagaaagtcggtttttttccacccctttcctccttttacacggcaagtaaagctcactggcctgggagttgcctctatctgccaacctttggccagtgaagaggattcagagaaaataatacaaccatcaatcagaaaaaggaggggcgacaaaggaaaataattaggctgtacctcaattgtgcattcccgtgcaaggtgccctgactcgccacagcggtaacagttgacttcacttgtcttgctgcagttgatggctacatgaccagtttcaccacacctatagcacttcactttggtgcagtctttttgaatgtgtccgaattctccacaagaatagcatttctgctcatctgcatggtcgcagtcacgagccagatggcctggtttgccacagttgtagcagcattgctctcgctctctcttgggctacttgcagtccttggcaatgtggccaactctaccgccattatagcaagcttcaacctcctgagatcacaatcctgggcagatgagcaggattctcccagggtgacacaattctcggagagaccgggagaacaacatgggaac

SEQ ID NO: 995 - DNA, 481 bp, Mus musculus
aagactgagtaattctttatttccacatacttaatacttaatgaaggagctttccttaaatattctctccaggggaaaacagagcatgacagcggcctccagctgccccgctcagggcctgggctcctccctgcccgaatggtgaggtggaggggtgtatttgccctctttcattagcttctcccgctgtttcttgatatcatgcattcgcctcatcgttttgtaccgaagcaagcactcttcgaagtcatcgaactctatcttgcactcctttttcgcccgggtcccaccgatcccgtgtgcacactctatccactctttttcaaatgcgtggcaccgagcggcgttcttatagggctgttctgcgcttaggaacataaagtgccggtccaggctgatgcccagctttttctgtatgtcaaggaaaggcatggctctgcagtgcccttgtcaggtccctggtgccggacgcgtgggtcga

SEQ ID NO: 996 - DNA, 688 bp, Mus musculus
aagagtcaaaattcatattagacagtgggtagagaaaaattaaattaagtcaagtagaggagttggggagagcccacctttaaacaccaaatcaagaaatctgggggaaagcaaaggattggtagaactggacacctgtctgtctgtccgtcctccaggctgacagtgtctgtgctactgggccagcagtacacagcagcaggcactcccatcttaagcagactggtcactcctcgccatgccctcccaagagagaggcctcagcagacagagatgggtcatggaagtaagggggtggtccaaaagcaaggaaaggccagcacaggactcccaatactgattctcctctagctggaggtgggcagggaggagacagagctcaaatactgagcagccagaaaaagaaaaagatggcgaggaacaggaatagggaatcttgccagctggaggctgggtgaccctgtcccagatccacacctgcgcctcttctgaaaggttcatgggcattgaacacggtggtgaaaaagccaaaggggaaggcaccgacaccaaaggagaagtggaatcccccggcatcaccaaatggctggaacccccctctgctctctggagctggtcgctggccctgagggcgggggtggagttttcaatctgggatcctgtggcttctggcggacgcgtgggtcga

SEQ ID NO: 997 - DNA, 193 bp, Mus musculus
gcggtaccggtcttgattcccgggtcgacccacgcgtccgccagaagccacaggatcccagattgaaaactccaccccgccctcagggccagcgaccagctccagagagcataggggggttccagccatttggtgatgccgggggattccacttaaacttagatgccgtcgccttcccgtttggctttttcac

SEQ ID NO: 998 - DNA, 697 bp, Mus musculus
cataataccaataaatttttttaagcagaaaaagattatagatttgacaaggaggtgaaaacaaagagctattttggattggaggcaggttaattatatttaaaacaacaacaacaaaaaaagaggtctccagaaaaaaaaaatctcttattttttcagtgcaatagttaagttccttcatattatagagacatatacacaatgttaacaaccatgaaaaacaatacaaaacgccctccatttaacaagtagaaaaatataactactatatatggcaactgtgaatctaatactgtacagaagtcatttgtgggttttacaaataaattatagcttaaatgcctttttaaaattattttcctccccccttcagatgtacaccagaagttaacaacaggaaaagtcccgagcctaggagacggcaaatcagtgccagtcgaatgttctgcccacgagcttgaaaaatttcttatttggctcatgaaagtattcgtgcagtttatcaagtagtttgggatccacctgggggtgcgcccggcctttggactcgtgtaagcagcggtccttgccactgtcccgcagcagtagaagcccttggttttgttaaagtagaagttcgaggcgttgatctgtggagaaagcttcaggaatctttcgaccttctggatctcagggaaagggtctctgatgaggcggt

SEQ ID NO: 999 - DNA, 420 bp, Mus musculus
  misc_feature (1)..(420): n is a, c, g, or t
gtccgggagaaggcacagcatccaatggttccacacagcagctgccacagaccatcatcattggggtgcgcaaggttggtacccgagccctgctagagatgctcagcctgcatcctgatgttgctgcagtnngatacgaggtccatttctttgactgggaggagcattacagccaaggcctgggctggtacctcacccagatgcccttctcctcccctcaccagctcaccgtggagaagacacccgcctatttcacttcgcccaaagtgcctgagagaatccacagcatgaaccccaccatccgcctgctgcttatcctgagggacccatcagagcgcgtgctgtccgactacacccaggtggtgcgcatccaccttcagaagcacatgccctatccacccattgaggacctcctaatgc

SEQ ID NO: 1000 - DNA, 802 bp, Mus musculus
  misc_feature (1)..(802): n is a, c, g, or t
gaaaatgttactcttttattatttcaaggaggtaatacatagcccagtacaccaaagcaacagggaatcagaggcagcaaatggccagtggttaggggaagagcctcatgctgcatctccaagctcccgtctgcctgctcacaggctgggacagtgaggcgagctcgctgtgactgtagcagtggatggacgagcaaactcagcaccctacagaccgtgccaggccggtgcagggcagttccaggattactgccagccctactacctgaggctgctgtcccggcagcagccagcctgcctggagtggacagggcgggaacaaatcctgagtgatcaattaaggtgaaagccttagtagtgttaacactctggatgagaaaagacagcactgtcttggaggggtgggtggggagaaggaacctgggccgcagcatagctggaggagggcctctcctggtacatgatggggagaggcaggggctgggcatggggaagctgcttcctctggcacagagttgacctagaggttggttttccactcataattgattacctgggtgtagtcatcataccaaggacaaaataagtctcactcataccaaacgtggcctcggagangatgtgactcggttttccccaggttatggggagggctcaatctaagagccttcttcattgccgacccctgtcctttgcagatgactggggtgaaagagacaagcataaatatggcctactggacccagtgctctcttccagagctcgtattggctgggaccacagccccacccttgcacagagc

SEQ ID NO: 1001 - DNA, 565 bp, Mus musculus
gtccggccaaaactctgggagccgatgtagcaagccaggttgggagcagtgtatgctgggaagcagcagcgcacccccttctcccccccccccccccaatgctgaaatggaagatatctgtgagtatctgcatttcagccactgctgtgactccacccacacacaccattcagtcaccagaccggcatcctctctggtataaatcttagctctgtgcaagggtggggctgtgggtccagccaatacgagctctggaagagagcactgggctccagtaggccatatttatgcttgtctctttcaccccagtcatctgcaaaggacaggggtcgggaatgaagaaggctcttagattgagccctccccataacctggggaaaaccgagtcacatcctctccgaggccacgtttggtatgagtgagacttattttgtccttggtatgatgactacacccaggtaatcaattatgagtggaaaaccaacctctaggtcaactctgtgccagaggaagcagcttccccatgcccagcccctgcctctccccatcatgtaccaggagaggc

SEQ ID NO: 1002 - DNA, 570 bp, Mus musculus
ctcatttacatcattttatttggaaatgtttgtaacagtacagtgaaactaaaggtcagagacaatggctgtcagtttaggcatcatctgtttattataaaagggaggcatggaaattatttacatgatgaaatagttcagacatcagtggaatggcagcttcacgtgacaccatttcaacagtgatttcagtcgacatactttccaagaatgtcactatctctaaataagaaataatccttgtcatctagaactactttggtgcctccatattctgggagaagaactttatctccaactttcacactgacaggctcaatctctccactctttcctttccctcctgaccccacagccacgaccgttgcttgcaacacttttccttgagacttttctggaagcataatgccacctttggttacagtttcggcagcactcctttcaaccaatactctgtcaaagagcggaagaaacttcctaaaagcttgtccagccatgactctcgccttcgccgccaccaccgcagctccggactctgaactcgggccgctgctcggacgcgtgggtcga

SEQ ID NO: 1003 - DNA, 281 bp, Mus musculus
  misc_feature (1)..(281): n is a, c, g, or t
gtccgagcagcggcccgagttcagagtccggagctgcggtggtggcggcgaaggcgagagtcatggctggacaagcttttaggaagtttcttccgctctttgacagagtattggttgaaaggagtgctgtcgttacngtaaccaaaggtggcattatgcttccagaaaagtctcaaggaaaagtgttgcaagcaacggtcgtggctgtggggtcaggagggaaaggaaagagtggagagattgagcctgtcagtgtgaaagttggagataaagttcttctc

SEQ ID NO: 1004 - DNA, 537 bp, Mus musculus
ggcaggggacccaaagcttttatttcactgataggtccacaggctggcgggtaatccctacagggccacctcagggcccacctctccttctccctggccttgggctacccgggcttccttcagggcccttcgcttcttcctttggagcagtcgccggtcacgttcaaactccttcatgcgtttcacggaatccaggggctcgcagtagtcccagtcgggctgctcgggcttgcaggccaggaagttggggaagctgtctcgcttgcacttcaacagccggatgaggtagggggcacagtagtcacgttgctgcagtgtcagctgggcatccatcatctcttggtggggggccaccatcactcgctccttgcgctccggaaagccgaggtccggcgggaagctgggtatcttctcggggtcaggctccaccgaggcatcccacagatagcgccgggtcaggggcgcccccatggctactctgccttacccttctttaggagccggggtcacctcgctcccaccggacgcgtgggtcga

SEQ ID NO: 1005 - DNA, 578 bp, Mus musculus
  misc_feature (1)..(578): n is a, c, g, or t
gtccggggggagcgaggtgaccccggctactaaagaagggtaaggcagagtagccatgggggcgcacctgacccggcgctatctgtgggatgcctcggtggagcctgaccccgagaagatacccagcttcccgccggacctcggctttccggagcgcaaggagcgagtgatggtggccacacaacaagagatgatggatgcccagctgacactgcagcaacgtgactactgtgcccactacctcatccggctgctgaagtgcaagcgagacagcttccccaacttcctggcctgcaagcacgagcagcacgactgggactactgcgagcacctggattacgtgaaacgcatgaaggagtttgaacgtgagcggcgactgctccaaaggaagaagcgaagggcactgaaggaagcacgggtagcccaaggccagggagaaggagaggtgggccctgaggtggccctgtagggattacccgccagcctgtggacctatcagtgaaataaaagctttgggtcacctgccaaaaaaaaaaanaacaacccaacccccaaccctaaaaacccggggcggccgc

SEQ ID NO: 1006 - DNA, 551 bp, Mus musculus
agcatgtatacaactggaactgttgctttaataaagaccggacccactttatgacaagtcagttttacttaaatcaggactgtccaacaaaaacattgctagccattcatgatctgaatttggtgtgtgaattaaattatggtggacattaaaagccatgagacatttgttttgtaataaataaggcagtggaattactcattagtagcctttttaagataagctattaggtctgccctttctcccttcttcttaattccagcgaagatcatttttgttccagggatgtactttttgggattctccaaatactccatcagggtatcctctccccaggtgatgcctttgttcttgttggcatctgtgtaagagaatccagcagcctggcctgtcttccgcccgaacagaccgtggagatttggtccagtcttatgcttgcctcccttttccacagtgtggcactgggcacacttctgaacaaaaatcttcttgcctttttcaacatcacccatttttaattcgttccgggctggtcaacaccacgaacgttc

SEQ ID NO: 1007 - DNA, 538 bp, Mus musculus
gtgcgggcgcgggccggcgtgtccttgggctagagcgcgggacgtctgtcttcgagtccgaacgttcgtggtgttgaccagcccggaacgaattaaaaatgggtgatgttgaaaaaggcaagaagatttttgttcagaagtgtgcccagtgccacactgtggaaaagggaggcaagcataagactggaccaaatctccacggtctgttcgggcggaagacaggccaggctgctggattctcttacacagatgccaacaagaacaaaggcatcacctggggagaggataccctgatggagtatttggagaatcccaaaaagtacatccctggaacaaaaatgatcttcgctggaattaagaagaagggagaaagggcagacctaatagcttatcttaaaaaggctactaatgagtaattccactgccttatttattacaaaacaaatgtctcatggcttttaatgtacaccataatttaattcacacaccaaattcagatcatgaatggctagcaatgtttttgttggacagtcctgat

SEQ ID NO: 1008 - DNA, 522 bp, Mus musculus
agtgttgcagtggagactcccttgaggtctcccatttatttaagtttatatgctatggttagagaagtaacttcattgagctattatatatgggtatgcccaactatgaccttattagatcccttacgaattcaggagtctaatattcacaacatggtcactgccttttagtttcttatacaaacatgcccccctttcccccttttaaagatatgtgcctggagagagtgggaaaaaaaaaaccaacccaaaacatcaagggcttgctagaaagatgaagcctagaaaagataaaatccccgtggcagttctgctcagcggcttgctgtctgtgagcggaggcacagtgctcacgtagggcagcactctgcccagtggtttcttggtcaggatggtgtgaaagcccttgaggttttctgtgtttggtgggaggaactggaaatcccatttactggatccactcgatgttcaggcaccgtgctatgaacgcaaacatatccgagacttcttctatcactttgg

SEQ ID NO: 1009 - DNA, 391 bp, Mus musculus
gtgcgggttcaacatctccattacacccaactacagcgtgtccaggctcatttttgtgagacatatgggccgcagccggaagcagagcaaccccctgctcatccacgtggacaccaaggccggccacggggccgggaaacccaccgccaaagtgatagaagaagtctcggatatgtttgcgttcatagcacggtgcctgaacatcgagtggatccagtaaatgggatttccagttcctcccaccaaacacagaaaacctcaagggctttcacaccatcctgaccaagaaaccactgggcagagtgctgccctacgtgagcactgtgcctccgctcacagacagcacgccgctgagcagaactgccacggggattttatcttttctaggctt

SEQ ID NO: 1010 - DNA, 497 bp, Mus musculus
gatattacttccaataagtacaatatttattaaacatatcttcagttttgttacatagggggcaacaaattacaatattctgcagccacaaattatatgcagagtatgaagaaactattaatcagataggggaatctttccatttataactctaccaggaagaactagcaaatcagatttacatataacggctcactaaactttatgcgtggaaactgacagacactggttgtgctgtgtgatacaaaatggctgaacttcatcttcagaagactaaacccaacatctaaacatgccaatataaacatcaaaacaaaatatattctaaccaaccacgggaaacgatctggtatcaggaaagcaacaaggattacacacattattttataaaccagcacacaaaggtttaaaacagttctgaaaatgaagttagcggtcttgagtcaagggaataaaaaaaaaaaagtcagtattgaccatttacaatctctgacctt

SEQ ID NO: 1011 - DNA, 607 bp, Mus musculus
gtccgcctccctttccattacctgtggcgcggagagttggggcggcggctgcgtcagcaagggcggtggtggcggcggcggcggcggcagctgcagtgacatgtccagcatgaatcccgaatatgattatttattcaagttacttctgattggcgattctggggttggaaagtcctgccttctccttaggtttgcagatgatacgtatacggaaagctacatcagcacaattggtgtggatttcaagatacgaactatagagttagatgggaaaacaatcaagctacagatatgggacacagcaggccaggaaagatttcgaacaatcacttccagttattacagaggagcccatggcatcatagttgtgtatgatgtgacagatcaggagtccttcaataacgttaaacagtggctgcaggagatagatcgctacgccagtgaaaatgtcaacaagttgttggtagggaacaaatgtgacctgaccacaaagaaagtagtagactacacaacagcaaaggaatttgcagattcccttggaattccatttttggaaaccagtgctaagaacgcaacgaatgtagaacagtctttcatgacgatggca

SEQ ID NO: 1012 - DNA, 592 bp, Mus musculus
  misc_feature (1)..(592): n is a, c, g, or t
cttttcttttcttttcttcctttctttctttctttctttctttctttctttctttctttcttccttccttccttccttccttccttccttccttccttcctttttctttttaaatacaggngtttctctacatagctctggctggctgggaactcactctgtagaccaggctggcctcgaactcagagatccacttggctttgtttctcaagggcttggaataaaggctttctcagccttgaattagaatccccctgaagctatctgattaaaggagacctttttcaagatgatcattagtagcatttctgtataaattaattttatgcccataatttcccatgtggctcttcttattaatacgtgctcctactgagggctgggaggacagaacagactccaagaccttttctcgtgtctcgctgaaggtcactgaaatcaaaaggcaacaaatctctaagtattaaaagaaaaaaagacagggatgctatgcttatggtattttatatcacaaaatgagtttgcaaagtcaagtatttcccagcaaaatgcggaagctcgctcacagctctgcacatccacccatctacac

SEQ ID NO: 1013 - DNA, 538 bp, Mus musculus
gtgcgcgcttatgtggggaaaccactgatcgacattgagacagaagctttaaaggattcagaggaagatgttgttgaaacccccgctgtgtcccatgatgagcacactcaccaagagataaaaggccagaaaacactagcaacgcctgcagtgcgtcggctggcaatggaaaacaatattaagctgagtgaagttgttggctcaggaaaagatggcagaatacttaaagaagatattctcagctttttggaaaagcagacaggagccatactgcctccctcaccaaaatctgaaatcacaccacctccaccacagcccaaagacaggacctttcccacgccgatagcaaagcctccagtgttcacaggcaaagaccgaacagagccagtgacaggcttccagaaggcaatggtgaagaccatgtctgcagccctgaagattccccacttcgggtattgtgatgagattgaccttactcaactggttaagcttcgagaagagctgaaacctgttgctttggcgcgtggaatcaaactct

SEQ ID NO: 1014 - DNA, 484 bp, Mus musculus
ttggtttttgggttttttttcaaaaacatgaaacatttaagactttattataaaatgttgttcttcataatttttctgaatttaagacagactaggctataccatgtttcaaagaaaaattgtattaaatggcttataatattttaatattaacattcaacgtttgacaaattgaaaggaatcagactagagggtttcttaaaagtcagtgcatgggtgttttgcctgcatacatgtataccacatccatgcctagtgtctgcagaggctcgaaggccccagattccccaggactgggtgttacagacagtggtcgtgagcaccatgtagtgctagaatcgagttctaggttcctgggaagagcagccagtgcttttaactaccgagccatctctccagcactatctgggtgtttgctgctcccttggaacttcatgtgtttggggtgcatatatgtgcaccacaggggtgcctaattttgcct

SEQ ID NO: 1015 - DNA, 540 bp, Mus musculus
tgcgcgttcgaggccctgtaattggaatgagtccactttaaatcctttaacgaggatccattggagggcggatccacgtgcccgctatccgcctggaaggagaggtgcaggagtacccccgaccttggctgcgtgctgactcgcttccttctgcgccgcccaggcttgcactccccggggatctgcctctgcatctcttgccttcgctgttggttccctctctgtccagctcccctcccgctctcgccctggagaatggctcagaaggagaacgcctacccgtggccctacggctcaaagacgtctcagtctggcctgaacacgttgtcccagagagtcctacggaaggagcccgccacgacatctgcgcttggtctcgtgaaccggttcaacagccagtccacagctgcccctggccagaagttggctgagaacaagagtcagggctccactgcctcgcaaggatcccagaacaagcagcctttcactattgacaactttgagattgggcgtcctttgcgcaaaggcaaatttggaaac

SEQ ID NO: 1016 - DNA, 480 bp, Mus musculus
aagtaaatttcagtgaatcaggtcccaggtagtattaaaggaagatttacagtaaacatttgaaactctggaatgccggtattattgtacaattacatttacaaaactgcttagacagtagttgctccagagtaagaattcaaaatgtacaagccagttcactatgactttagatacaatgttattaaaatacactgttaatcataaaaatactttagtatatacatgtacaaactcagatttacctactgaagggagcttctagtagccacttgcaggcaactggcgcagaaacactgcaggtcatcttggtcttcccagcgtcccagcgggccaggagtcagggctgcacacgccatcctaaacagcgatcaccctctctctctctgctggctgaaggctaggctgaagggtcgcttttacctccactgtacttcgcttttctaaatcctgatccaagtaactctggacattcacaca

SEQ ID NO: 1017 - DNA, 559 bp, Mus musculus
gtgcgggacaatcgctttaggatcagtaagtctcggtatgactcaatagatagctacctgtctaagtgtggggagaagtacaatgacatcgacctgaccatcgataaggagatctacgagcagctcctggaggaaggcatcgatcatcttctggcacagcacgttgctcatctctttattagagacccactcaccctttttgaagagaaaatacacctggatgatgccaacgagtctgaccattttgagaatattcagtctacaaactggcagacaatgaggtttaagcctcctcctccaaactcagatattggatggagagtagagttccgaccaatggaggtgcagttaacagactttgagaactctgcctatgtggtattcgtggtactgctcactagggtgatcctctcatacaaactagacttcctcattccgctgtccaaggttgacgagaacatgaaagtggcccagaagcgagatgctgtcttgcaggggatgttttatttcaggaaagacatctgcaaaggcggcaacgctgtggtggacgggtgcagca

SEQ ID NO: 1018 - DNA, 563 bp, Mus musculus
cacatggaagggaccccgccaggggcggcgccctcctcggcgctggccgccgtgctcaagcacagctcagcgttgccgcccgagagcgcccaggtccaaggctacgacttcaaccgcggcgtagattaccatgcgcttctggacgcctaccgcaccaccggcttccaggctaccaacttcgggcgcgcggtgcagcaagtcaacgccatgattgagaaaaaactggagccactggctgtagatgaagaccatcacgcagacctgactcagagccgccgcccacttacaggctgcaccattttcttgggctatacttccaacctcatcagttcaggcatccgggagaccattcgatacctcgtgcagcacaacatggtggatgtattggtgaccactgctggaggtgtggaagaagatctcatcaaatgcctggcgcccacataccttggcgagttcagcctcagggggaaggagctccgggagagtgggatcaacaggattggaaacctgctggtgccgaatgacaattactgcaagtttgaggactggctcatgcccattct

SEQ ID NO: 1019 - DNA, 547 bp, Mus musculus
gtccgggtctagatcgcgagcggccgccctttttttttttttttttttttttttttttgactcaaaaaacccaaccaaagggccatttattctaaagatgctgctgaccaaggagtgggcctagggaggggctggcatgtaaagtaataaataaaggggtggcaaaaagcctcagtctttaccaatcttcttaggcttcattcttctcagctctgaaggcatctgccttttgggcgaatgtctcagccaccagcaaggggaaaaccagagaagcatcagcatagacctttactggctgggcgtccatccggatcttgccccaagagacagcctcatctggccgggctccggagtctgagccatcaaactcctgggctgggttgatataaacagcgtagtctgctccattcctcatgaggttagcgttggcaatgtggtgcttgaccacgcctccacccaggatgatcatcccagagcgcttggcgaaaatggcctgcgtgttgatgagtcgcaggtcttcaacaatgtccaggaccaagcctgggtt

SEQ ID NO: 1020 - DNA, 146 bp, Mus musculus
cagcgaaatggattcttttaattactgaagacagtacaaactgatataacttataaaaatttaaaaatatgtttctagaccatgaaaatgtatatatcctttggcctgatgaacccattaatggaattttatataaaaaagaccaa

SEQ ID NO: 1021 - DNA, 574 bp, Mus musculus
gtgcgggcaaggcccacgagggccgcttctgccgctcgtcttccatggccgaccgctccagccgcctgctggagagtctggaccagctggagctcagggtggaagctttgagagacgcagctactgctgttgagcaggagaaagaaatccttctggagatgatccacagtatccaaaacagccaggacatgaggcagattagcgatggagaaagagaggaactaaacctgactgccaaccgtctgatgggccggaccctcacggttgaggtctcggtggaaacgatccgaaacccccagcaggaggaatccttgaagcatgccacgaggattatagacgaggtggtcagcaagttcctagatgacctggggaatgccaagagccacttaatgtcactttacagtgcctgctcatcggaggtgccgcctgggccggtggaccagaagtttcaatcgatagtcatcggttgcgctcttgaggatcagaagaaaatcaagaggcgattggagactctgctgaggaacattgacaactccgacaaggccattaaactcctagagcatgctaaaggagc

SEQ ID NO: 1022 - DNA, 496 bp, Mus musculus
gggttgtttttgcctggtttcttttaatggcaacgggacaaaaatcagcgaagaacacacgatcagttacttagaagtcagcatccaaggtaaaagagttctctgtcgaattcgacatgactcccatcctctgatactcgcctactcgcttctcaaagaagtttgctctttccttctagggagatattttccatgaagtcaaacggattttctactctgaaaatcttgttctaacccagctccagcataagcctgtcggccacaaactcaatgtactgcttcatcaaagggcagttcatcccgatgagcttcacgggcaaggccctcgtgaggaactcctgctctatcctaacggcgttggtgattatctctcggaccctctgctctgctggcttgggtaccaggtgcttgaacatcaggcaggcaaagtcacagtgcaaaccctcgtctctgctaataagctcattggaaaatgtaaggcccggcatcagccccc

SEQ ID NO: 1023 - DNA, 574 bp, Mus musculus
gtccgggtttcgcctgctcctcgccgtctccgccgctgccctcgttcgccatgctctccgtccgcaccccgctcgccaccatcgctgaccagcagcagctgcagttgtcgccgctgaagcgactcaccctggctgacaaggagaacacgcccccgactctcagcagcacccgcgtcctggccagcaaagctgcgaggagaatcttccaggactccgccgagctggaaagtaaagcgcctactaaccccagcgttgaggatgagccgttactgagagaaaacccccgccgcttcgttgtctttcccatcgagtaccatgatatctggcagatgtacaagaaagccgaggcctccttttggactgccgaggaggtggacctttccaaggatattcagcactgggaagcctctgaaacccgatgagagacattttatatctcacgttctggctttctttgcagcgagtgatggcatagtcaatgcgaacttggtggagcgatttagccaagaagttcaagttacagaggcccgctgtttctatggctcccaaattgccatggaaaacatacactctg

SEQ ID NO: 1024 - DNA, 344 bp, Mus musculus
attttacagcagcatgtactggtttattctgagagaataaaatacatgagacatagcttttatttttgtttgcaacttagaaaactgagttatttttttttgatgtaaaaccacaataactcatttgaggaccatgccacctttggaaaacgccacacacctacttcttatatgtgtcggagttcccagacatgtcaagaagtgactgactgctcctgactccttccctggcaacagcactgactctgctgggaagggcccagagcaagacagcacaggagcaagactttacctaaaagcaaaccacctaactggcttggatacacgtgattcctacttttata

SEQ ID NO: 1025 - DNA, 609 bp, Mus musculus
  misc_feature (1)..(609): n is t, c a, or g
gtccgctggtggaagacctgaagacccgggagagcgaggagcagaagcggaaccgggtgcgcggcatcctgaggatcatcaagccctgcaaccatgtgttgagcctctccttccccatccggcgcgacgacggctcctgggaggtcatcgaaggctaccgggcccagcacagccagcaccgcacgccctgcaagggaggtatccgttacagcactgacgtgagtgtggatgaagtaaaagcactggcttccttaatgacatacaagtgcgctgtggtcgatgtaccgtttggaggtgctaaagcaggcgttaagatcaaccccaagaactatacagataatgaattagaaaaaattacacggaggttcactatggagctggccaagaagggttttattggtcctggcattgatgtgcctgccccagacatgagcacgggtgagcgggagatgtcctggatcgctgacacctatgccagcaccatagggcactatgatatcaatgcgcatgcctgtgttactgggaaacccatcagtcaaggaggcatccacgggcgcatctccgctactggccggngtgtcttccatggaattgaaaacttcatcaatg

SEQ ID NO: 1026 - DNA, 568 bp, Mus musculus
aagttaatggtctttttattggaaaaaaaaaaaaataaaagactagcatttacaacttggaatggacgtaaattatcatttcctgaacagcaatgttgatggtgtgctcaagtccacagacacagcctactctgctggctccgagtcatggttcactaggttttaaaacacagtccaaaaatgctcccttaggaaacatttcttaataaaatgtgtgggatttggtgacagccttgttgttcagtcactccaatgcaatgcgcacagcaatgaaccatcacactcgggctcgccaccagggtgtcactgtcaccatgggactggggcacttgatgaggactgtcctacttctggggctgtgtctcaaagtttagccttcccccattctctgcacatcaatcatcctgaggtaaaccaattttaaatgtttgcttgcagtaaactggctgctgacaatttatctgaacagattgaactagaagccatctgagattttgaatttgttttttccatttttcagttttaatacaaatgcctgactgtgctcaatcatcaagctgcatgcatg

SEQ ID NO: 1027 - DNA, 616 bp, Mus musculus
gtccggtggatgctgatggcaatggcaccattgacttcccagagttcttgactatgatggctagaaaaatgaaagacacagatagcgaagaagagatccgcgaggccttccgagtgtttgacaaggatgggaatggttacatcagtgcggcagaactgcgccacgtcatgacaaacttaggagaaaagctaacagatgaagaagtagatgaaatgatcagagaagcagatattgatggcgacggacaagtcaactatgaagaattcgtacagatgatgactgcaaaatgaagacctactttcaactacttttccccctctagaagaatcaaattgaaatcttttacttacctcttacaaaaaaaagaaaaaaaaagaaaaagttcatttcttcattctgtttgtatctagcgaagctgaatgtcagaagcccctctgtccacacacaaagtctgcatgtattggtcggtggtcctgcccctaaagtcaagcccctacatcagttttacagtataaatactcgtactaccttataaggaagcacttagtggactccttaaagttccatttgctaatgattaatacactgtttgggctggccagtttctcatgcatgc

SEQ ID NO: 1028 - DNA, 499 bp, Mus musculus
gacattcagatgttttaattgttggttgaacatataaaaaggagccaggcactgatgatttatgaaaatggaacagaacactgaagcaaatgtctataaatattaaacatacagaacaaaccatagttatttgcttgtacccactcggagcattgacctgtcatctatgaagtacacagtaacaatcactttgtcaggaagtgtctttaagtcagaagacggtgtattactgtctgtagtcagagaaggccgccttagtagagatcctgaaacgaatccttgacccacagaagggtttaaaaaaaaaagttcctgtgaaaaaacaagacacttgtaaagaaattacttggaaagtagaaaccaagtatgtatgcatgagtcccaagtgatgttttctgtcagttacactcttaggacctgaacaataacttaaaatactccaggcacagtgcttcagttgaaaagaaacaatgcatgaatggcagccaattacttttaa

SEQ ID NO: 1029 - DNA, 464 bp, Mus musculus
gtccgctcggatattcgtgtgaatgccgtgggctgatcaacgtcaaaggcaaaggggaactgcggacttactttgtatgtacagacactgccaagtttcaagggctggggctaaactgaggtggctggtggtcagcctccttccccgagggagccaagaatgtagccccatgtctgttgcagtggcttctttggacttgcactacaggatggctttgacctgtgcatcagattctgtttgaagcagctactgcgttgtacacagaggctctgtgcttcagcctctacagttccaaattagctagaccactggtctactacaggctgtgttcatttccagggtgctggggaagagacttcagtgcatgaccaagatagacatccaccttggtggccagtgaacagcattcacaggagacaaaagctctactggctacaggaggctcagccagggtgactagcatg

SEQ ID NO: 1030 - DNA, 537 bp, Mus musculus
gtctcacatttttattataatatatatatgcagatctgctaaatactcagtaatagatcctatcagatagccagcataaggcgctctgctggcaatctacctcaggtcaggtacaagtccttgtcactctccagagcttaagacttcggtgctgatttcagtcccaggccacaaactaaatcaagacactaactgcactaaggacacacgtgagctgaaaggaacacgggatcaggtgtaatcaacggcacattttgtgcaagtggtgaatagtgtgcgttttgcgtagcttctttgatgtgcagggtggcaggaagcagctgcgtgtgactggctggagtgtctccagggctcactgcttctctggctcctccttcttggactctggcttcagtttgtagtcagccagggcggccttgatggcgtcttctgccagcatggagcagtgcagtttcacaggcggcaggcagagctccttggcgatgtcggtgtttttgatggtcagggcttcctccaccggtttcccctttacccact

SEQ ID NO: 1031 - DNA, 534 bp, Mus musculus
gtgcgggcgggaggatggcggcggccacgggagctggccgtctgaggcgggcggggtcggcgctgctgctgcggagcccgcgcctgcccgcccgggagctggcggctccggccaggctctaccacaagaagggtgtggatcattatgaaaaccctcggaacgggggatcccttgacaagacatctaaaaatggtggaaccggattggtgggggctccggcatgtggtgacgtcatgaaactgcagatccaggtggatgaaaaggggaagattgtggacgccagattcaaaacatttggctgcggctccggcattgcctccagctccttagccacagagtgggtaaaggggaaaacggtggaggaagccctgaccatcaaaaacaccgacatcgccaaggagctctgcctgccggctgggaaactgcactgctccatgctggcagaagacgccatcaaggccggcctggctgactacaaactgaagcaagagtccaagaaggaggagccagagaagcagtgagccctggagacac

SEQ ID NO: 1032 - DNA, 514 bp, Mus musculus
acgggaaaaaatcaaatgtatccaagaataaaaaacacagcacataaagtagtgtatgcattccagtgtttgcgccgcacacggcgggcacccaagaaaaagctcttctaacggcccggctcaagaccaccggccaggggcaaacggttcggttcagttctttttgggcggcagcaggccggccctcaggcacagtgtggggggccgcctgcctctcccgcggcccggcgggcaggagcagcaccagcttctggggcctccgggccagcggtgaaccccaggccagcccgagccgcctgccaggcagaaccctccaggtggggtggatatgcctggtcctctggggcagcagcagcagtagcagcgacaccctcggaaccgtgggctccagagccggccacagagcacccttggaagccttctagtcggcctttttcagaaagatctcactcaaaatgacccacaccggggagtcagtctgaatggagagacgtagtgcttccagggggccaaa

SEQ ID NO: 1033 - DNA, 539 bp, Mus musculus
gtcttgccgccttgccccaaccctgctcggccccggcccagcctcagatcgaggccgccagcaccgcgcaccgcggaggagcagctcgcacgcgccctccacccccgtccccattcccgccctgcctgtagcctcctctcccgggcccgcagctcccccggtcccccgggccatgcggcctcggccccgccggcgcccgccgcgcatcgggggagatgaggctccgcaatggcaccttcctgacgctgctgctcttctgcttgtgcgccttcctctcgctctcctggtacgcagcgctcagcggccagaaaggtgacgtggtggacatttaccagcgcgaggtcctggctctgcgagaccgtttgcacgcggctgagcaagagagcctgaagcgctccaaggagctaaacctggtgctggaagaaatcaagagggcagtatccgagaggcaagcgctgcgggacggagaaggcaatcgcacttggggccgcctaacagaggatccgcgactgaagccgtggaacgtctcgcacaggcac

SEQ ID NO: 1034 - DNA, 595 bp, Mus musculus
ggccagagcaaaacattaactgtagttaacagtttactaatctgatatttgaaataaatcattaatatctttctaacctgaggagaatctgatgatttatgagaactgcctgttcacttctacaaagaacctgcgtatacaaccgggatattcctgttatgccagtaagaatacactgactaccacaacaaataagtcagtgttcttatttggaagctataaaaataaataagctgaagttcgtggcacaagcctgcaatcctggcgtctaaaaggctaagtaaggcaagagaaacaagtaagactgggctgtacatagtgagcttgagactagtctaagatacagtaagatgctggtggtgcatgtctttaatcccagcacttgggaagcagaggaagtcagtctggtctacagagtgagttcaaggacaaccaagactacacagagaaaccctgtctcaaaaaacaaacacaaaatcaaaacaaaacaaaagggactgaaagatggctaggcaggcagtatttactatatgtttaagcccccgagtttaaacctcaggtacttgcataaaggccagcaagccatggcagtctg

SEQ ID NO: 1035 - DNA, 570 bp, Mus musculus
gtgcgtggtttttttttttttttcctttccttttctaacaggaaaaaccttgctggaacttgtgattgagcagtttgaagacttactagttagaattttactgctggcagcatgtatatctttcgtaagtatttaaaaaattattttgtctccccataaaagttgaaagaatttcgttgggacaccagaaaataaataattaccattgagtttccgtgtttaaaaacaaacaaacaaaataactcaagaattagaggggggaaaatgatagaagctgttttgcttaggttacagggcagtgagaggtgacccctgactgcgcagggtctctggaattcttgggtctcaccagtttttagtatcagaaagttcctcactctaagtccttttctgttggggttcttccatttgttatcatgttggaagatcacactacgatgatgttgggcactctgtaaatagatcgtacaaaaggaatattccaggtgctttgccttcctggtggtggcaaggtgacagttgttcctgacagtgacaagaatgatgacggcagtgatggcaccactgttg

SEQ ID NO: 1036 - DNA, 540 bp, Mus musculus
gaagttagagactttatttagctttaaaacaccatgctctaagggcatgcctggagcagtgcagaaaggcaggtataactgtgtctgcaggagactcggcactgaccaccctaacctacctggtggcttcctgggctaagaccaggtagaccagcaggcccaatggtcataaaagcatgatggctgccacccatggtgcctggctggcagggctgcattcctgatggctgggtgccttcactctgggagccgggagccccctcgccggccagagttatcacgccatacatagtagttgagcacggtggcaaaagccagccaggccaggtaagggtacagcaagcgggcagccggcgggctcactcggtgccaagccagggttgtggcagtcgccaccccactgacaagcagaagatcggccaaggcccagcccatctgccgggcaccaaagaagatggggggccacgcccagttcagagccagctgaccagtgtagagacccaagggaaccatagcgtcctctgcggacgcgtgggtcga

SEQ ID NO: 1037 - DNA, 555 bp, Mus musculus
gtgcgcagaggacgctatggttcccttgggtctctacactggtcagctggctctgaactgggcgtggccccccatcttctttggtgcccggcagatgggctgggccttggccgatcttctgcttgtcagtggggtggcgactgccacaaccctggcttggcaccgagtgagcccgccggctgcccgcttgctgtacccttacctggcctggctggcttttgccaccgtgctcaactactatgtatggcgtgataactctggccggcgagggggctcccggctcccagagtgaaggcacccagccatcaggaatgcagccctgccagccaggcaccatgggtggcagccatcatgcttttatgaccattgggcctgctggtctacctggtcttagcccaggaagccaccaggtaggttagggtggtcagtgccgagtctcctgcagacacagttatacctgcctttctgcactgctccaggcatgcccttagagcatggtgttttaaagctaaataaagtctctaacttcaaaaaaaaaaaaaaaagggcggccgc

SEQ ID NO: 1038 - DNA, 361 bp, Mus musculus
gccaagaaaatccaatatttttattcacactggccaagcaggcaaggacaggcgggctgaggggggtttcgtaaagccagccctcacagcacagggggggccttgcctttgttaccctgccatgggtcgcttggttgaaagcaccaaaaatgccctttcagggccagccctgccttggatctgcaaaagccccaagggacgggggccaccttcccctgaaaagcttgggcaggctacagggggaaaggggaaggttggagggccaccaggctacacaccctgggaaagacggggggggcttgcttttttcacaacctcccccagggcctgttttggcagcatggctcaaaaaaggccccca

SEQ ID NO: 1039 - DNA, 557 bp, Mus musculus
gtgcggggaatctgtggcctcccatctccccaaaggctgtcgacgatgctgtgaccccgaggacctgatgtcctctgatgatacggtccaggcccctgtttccccttatgtcctgcctgaagtcaggccggacatcaacattactatcctaaagggtgacaaaggggacagaggtcctacaggaacaccagggaagccaggcaagaatggtacccgaggggaccgtggctctcagggtgtcaaaggtgacaaggggcaggcaggtagccctggcagctcgtgccagacacattactcagccttctctgtgggccgcaagactggcttgcacagcagcgagaacttcctctcactgctgttcgacagggtctttgtgaacacggatggccactttgacatggccactggcagctttgtggctcccctgcgcggcctctacttcttcagcctcaacgtacacagctggaactacaaggagacctacgtgcacatcgtgcacaatgagcaggcagtggtgatcctgtacgcgcagcccagcgaacgcagcatcatgcaga

SEQ ID NO: 1040 - DNA, 393 bp, Mus musculus
agccttgagaatgggttttatttaatatctacatagcagatttatagagttaatttggcttctcctccagtaaaaggtctctggagggtgctaatgacaggtgggttccagaaattgaaagaaaagtcaacacggctggcctgagccgggggagcttcagggcccagagccaacttagcaagggcaggctcagccatcctgagagtctgccaactctagatcaaagtcccttcctcggactctggagggaagagggtagccctggggggggggggggggctctgtccagtccactggggcacagaggaaggcaaatccaaaaccttgggggggaggggggacacatcaggaatacagcagagggagactgccaccgggggaggggcccccagg

SEQ ID NO: 1041 - DNA, 366 bp, Mus musculus
gtgcgtggagaaggtgaccaggaagaatgcctttaagaactatggcttctacggctgctactgtggctggggcggtcgcgggacacccaaggatggcactgattggtgctgtcagatgcacgaccgttgttatgggcaactggaggaaaaagactgtgccattcggacccagtcctatgactacagatacacaaatggcctagtcatctgcgaacacgactccttctgtccaatgaggctctgggcctgtgaccggaagctggtctactgcctgcggagaaacctttggacttacaaccctctttaccagtattaccccaacttcctctgctaatggccggtgggcgctctggcctgggggcacct

SEQ ID NO: 1042 - DNA, 579 bp, Mus musculus
aaattgcaagcgtattcttttaatgactccagtaaaattaagcatcaagtaaacaaaagtggagaagaacctacacttttaacttgtctcactagtgcctaaatgtagtaaaaaggctgcttaaattttgtatgtagttggatttattttggaagctgaaggtatccatctgcagacattgaggctcaagttgaatttggattcaaggggattcttaatacttctgcctgtgctgaagagagaagcttcctaaggaacaagcaagttgaatagagaaaatagtgatcaataataggcattttagtggtctttttaatggtttctgctgcggaacatttcaagatttattgatttcctcctccccccatttttttcccaccacactcacacacgcacgctcacactttttatttgccataatgaaccgtccagcccctgtggagatctcttatgagaacatgcgttttctgataactcacaaccccaccaatgcgactctcaacaagttcacagaggaacttaagaagtacggagtgacaactttggttcgagtttgtgatgctacatatgataaagctc

SEQ ID NO: 1043 - DNA, 555 bp, Mus musculus
attttattcgtgtaatagagggatttctttatcggttgccttcttctcaatcattaggagttgaggagtactgaatccattactactctgatgacacaggtaagaatccattttcacattgcgggggggcaagagttccctctaatggcgggggccagccagcctgcttctacttctactgaacacagcagtgcccattggtatctctgaagcgtaaccgcatcttaggtcggtacttctccaagtaaagcagctgtttggaattgaatgctcctcttcttttttgtcttataaattgaacagcatcttcatacttcattccgcattcaatcaatgcaagcgcaactagcacaggagcccttcccaatcctgcaacacaatgcactgcaacacaacagcctggctcttcacgaaatttggtttttaacaggtttagccaatcatctactatctgattagggggtggagctccatcatcaaacggccaatctagaacgtggattccttctttttcaactggagctttatcatatgtagcatcacaaactcgaacca

SEQ ID NO: 1044 - DNA, 589 bp, Mus musculus
gttcttattggcttgcttagcctttatataattcaagactatgtgaataggggtgtcactgcccattgtggactgggctcttccacctcacaggattattaaacaagaaaatgccctcacaggagtgtccatagtgcaatcttggcacactgatggaccgccaaagaggaactcaggagtttaaagaggaacttacaagaggaactcataaaactgccaccttcagtaggacataaatattttctcatgatagtttgttttttgcttataggaaggccattgtgacaggagcagataagatgccactggggagcatcttatttatggagtaaacattggagacatctccagtgacaaaaccattttcttgggtaaattatgtagctgttaattatgaaactgccatgcccagccatctggaaaagcagacagcatttaacattatttttgatgaactgatttggccaagggtactgttgttagttttaatgggtggaatagtaagtcgtcctcaagaggactttgtttcctatttccccaaatactgatctgagttaacagtgtagaacttaatgcatttttccttttg

SEQ ID NO: 1045 - DNA, 598 bp, Mus musculus
gtgcgtgcgtgcatgtgatacaatgcacctttactttacaaagacagtctttgccagtgctaagagggaaaattttagtacagaaatatttgctcacagactgagaaattgggtgcctcctacagtgtgatctgaccggtctttaacacatagaacttagccgtgtccattgcaagtggaattcacagcccccgtaaacttgaaccagttgcccctgtggtccgcatgcttactgagcaaagcaccaccaccctagtttctgccctccacacatcatcagtggtaccttaagtcttattcctgccaaaaggaaagatcctttagcactcacagacaggtgtatgtaaatagtctagacttgagataactggtgagcgccagacagaatggtctgagagtatgtagcctgctaacttccttagcactgagtcagtacagcacccggtctacacatctataagattagcaactgcatacactcagcaagtaatggtgcatcctgtagtaaagtggaatcaaagtagcaatagcacgtgcttgaaggagtccgactgcagcatggtcccatcgagtaaaagcataacaaggcatgagcctc

SEQ ID NO: 1046 - DNA, 567 bp, Mus musculus
gagtttgaggtacaagtttatttttcaaaaggcatatatagacagggaacaaagtaaacatttacaaggtggtgactgtcctagacactgctccggaagtctgtctaagtgcgtcctcttagtaatcggcgtcgtcttcatcggagtccattacttttcttctgttgaatttcactgttgttttcttttctgtctgttggctgactttctcaagtatttctatcaaaccttgttctgacaccttcccacttagctgtccataccgcgccatctgtataaggtagttctccactgctttagttttttcaggctttacaagtgctaagttacttaatctggcccgggctgactgatccagaacttgggctaagatactgtttctcatttctgcttccctttgctttgcttcctgttgggctgcatcaccaggatctccatgcttggcctgcaactcggccagcctctgcttcctcagcgcctcaagttcttcgtccgccatggcgcggctgtcccacgtcgcgcaggcgcagcggccgtcgggggtcgcgcagccgcagccgccctccg

SEQ ID NO: 1047 - DNA, 591 bp, Mus musculus
gtccgaaggcgccgggctcgagtctccggccgaagcgattccaaccgagtgtaccggagggcggctgcggctgcgcgacccccgacggccgctgcgcctgcgcgacgtgggacagccgcgccatggcggacgaagaacttgaggcgctgaggaagcagaggctggccgagttgcaggccaagcatggagatcctggtgatgcagcccaacaggaagcaaagcaaagggaagcagaaatgagaaacagtatcttagcccaagttctggatcagtcagcccgggccagattaagtaacttagcacttgtaaagcctgaaaaaactaaagcagtggagaactaccttatacagatggcgcggtatggacagctaagtgggaaggtgtcagaacaaggtttgatagaaatacttgagaaagtcagccaacagacagaaaagaaaacaacagtgaaattcaacagaagaaaagtaatggactccgatgaagacgacgccgattactaagaggacgcacttagacagacttccggagcagtgtctaggacagtcaccaccttgtaaatgtttactttgttccctgtctatatatgcc

SEQ ID NO: 1048 - DNA, 567 bp, Mus musculus
ggcatggtcagctgaggatttattggcataaacgcaaccatataaaaacataagttatgaaaaacacagtcacgatgtacccccccatcccccaagcccatccccccgagcccccttctgcaggagggccagcctggcacctcctcagcgcatccggtagtcggtggaacaagagagctcacacagctgacccttgaagtccaggtcgatggtaaagtccaagtcacgattgtttttggcattgggcctcattccaatggtgccaaagatctcctcgccagtcttcactggtaggtagtcctccatgtagaacacagtctgcttccagtgtgtgtacggggactcaggactggtggagaagccggtcctcttgtggcatcgggtgaactcgatgttgaagtaagccaccagcgcgtgcacgtagtcggtcctcttcacttgcaggcagaagggggaggtgaaggtcaggtcctccaccttgactgtgtagatgtccacctcctttatgaggcaggcattggtgaccagctgctttgggtccaccacgtccaccaggggctccttgat

SEQ ID NO: 1049 - DNA, 571 bp, Mus musculus
gtgcggggagctgcatcatggaggtttcctgtggccaagcagaaagtagtgagaagcccaacgctgaggacatgacatccaaagactactactttgactcctatgcccactttggcatccacgaggagatgctgaaggatgaggtgcgcaccctcacataccggaactccatgtttcacaatcggcatctcttcaaagacaaggtggtgctggatgtgggctcaggcactggcatcctctgcatgtttgctgccaaggcgggggcccgcaaggttattgggattgagtgttccagtatctccgattatgctgtgaagattgtcaaagccaacaagttagaccatgtggtgaccatcatcaagggcaaggtggaggaggtggagctgcccgtggagaaggtggacatcatcatcagcgagtggatgggttactgcctcttctacgagtccatgctcaacaccgtgctgcacgctcgggacaagtggctggcacccgatggcctcatcttcccagaccgggccaccttgtatgtgacagccattgaggaccgacaatataaagactacaagat

SEQ ID NO: 1050 - DNA, 314 bp, Mus musculus
ggtgggactgtaactgtatttattgagggacccaggacctctggtgaggccctggtgaggaggggcaaaggatgaagtagggcatgttgaacactttatgatggaactgcttccagactacgcgaggggaaggcgaggcctcaagcacacgggcgcacccagttgccctcagacggagatggacgacaggtgggtactggggcagcattgccaaagaggtttacacactcgctggatacattcatacggagagactcaaagctatctccgggactccaaaccagtgcaatcgacttagtgcaaattcaaaaggg

SEQ ID NO: 1051 - DNA, 496 bp, Mus musculus
gtgcggagtggctctgcaaagtcccaaggttgcagagcctcaataactggagaatggaaaagaagggcagtgcagggtgtcaccagaaggggagtgggggctgcaggtatcggactccagagggattttacagcaaggaggctgcagtgggtccagcctgcagacacaccattcccatgaggcactgcggcccagggactggtgcggaaagggcccacagtggacttggtacactgtatgccctaaccgctcagtccctgggtctggcatgacagacagaacatttccaggggagtcaagggcacaggatgaagccagacgaggcgaggcaggcggggcagaatgaatgagtttctagggagggaggttgggtgcaggtagagcgagtagctggggtggtgagccagggaggcactggcctccagagtccgtggccaaggagggccttgcgggcggtgacggagcagtgatcggtgtctcgaagagctcggactgg

SEQ ID NO: 1052 - DNA, 536 bp, Mus musculus
gcaccaaacacattcgcatttatttttttttttaagcaaatgacaaaaacccaaattaccagcgttttttaaacctaagcttaacattacatatttaaacaatagtcaaactgacgaggttgccgacatccatgcacaactagaaaacatccttagtggacactaaaccagaaatggattaccattgatgcagtaatagctttcatcactaaatactgaaaataaaattgaagtatttctgtagattcatctggcaatgttaagtccacagcaggctgacactactcactcacaattcaccacaatgggaagcagatccatgctggtgttacagacagtctcttcctagcactactcaaaagtcacagggctcacctcagattacgattggtttaaagcaaagtgcatacagagattacaacaattttaaggacaaaagaaatagaaaataaggtcctattttgtggtcccaacaacaaactcaaaaatctgatagatggaggctccaatgagcttttttataaatactttagttt

SEQ ID NO: 1053 - DNA, 552 bp, Mus musculus
gtccgagaagagaaaggaaagcgcgaggagacgccgccgccgccaccgccaccagcgcagctgtgccacagccgcgaggagaccggccggctgacttccctcctcgctggccggcgtgtcctcggatttattccaacagtcagttaaaacatggtggattactatgaagtgctgggcgtgcagagacatgcctcacctgaggacattaaaaaggcgtatcgaaaacaggcacttaaatggcacccggacaaaaatcctgaaaataaagaagaagcagagcggaagttcaaacaagtagctgaggcatatgaagtgttatcggatgctaaaaagcgggacatctacgacaaatatggcaaagaaggattaaatggtggtggaggaggaggtggaattcattttgacagtccatttgagtttggcttcacattccggaacccagatgatgtcttcagggaattttttggtggaagggacccattttcatttgacttctttgaagacccatttgatgacttttttggaaaccgaaggggtccccgaggaaataga

SEQ ID NO: 1054 - DNA, 393 bp, Mus musculus
ttttgtttttgtgtgtgcatcaacatcttttattggttcacatttttttcagaaaattgaataaaaatacatggaattggaatttgcattacaatacattgtgcgattacagaatatgaacaatgacgtatactccttcttgtgggggtagaacatttcattccactaagagaatcacatgattagttaccctacactgtctgttgttctgatctcagagactggcagacttgaaaggaaaaaaaaacttaaaaaataaataaataaaactgaacaggcaactcccttggtttccctggtcctttctcctcttgccactgtcttcaacacaaggacgggggggcaggtgtgagggagcctcgtggggcagggtggctgctgctggctggacac

SEQ ID NO: 1055 - DNA, 536 bp, Mus musculus
acgcgtgcgaagacgaattaccctgtgactaaatacactgtctgcttttactaactggtgtagcattgtctcctttaataagtcttgtgtccaaaacgagaaaaaccattggccacttttgcaagtttcctgcagtgtgcttagcaagggaggtggcgacttggctaatctacttgaactgcatcgcatggctcttgggtagcttagagcatcgcagggtagaggcagaccagcagtgagtgtctctcctggtacaattattgtctggttctcagtggaaaacgcttaatttgctttaaacttggtgtttttgtgaggtggatttagtcttaagctgtgtcccataagaactacattcacaggcaagtggctcttcctccacacagcctatacatcttctgaggtaattactttcataaggaagctgttcataacgtaagttattattattattgaacacaggtggatgtgaaggatttttcattgaaaaaccaaatgggttttctttttttctgttcagtgagcccacaggaact

SEQ ID NO: 1056 - DNA, 561 bp, Mus musculus
cttttgagcatatagtactctagttatatacatttaaagcagagaaaacaaggcttgaaactggtaaaaaaaaaaaaaaagttaatttaatccatattcagaaacttgtaaaataaaagcatataatgaagaaataattaagaaagttgtacaaacgaccttggttattatttcgctttataaaagtaatccaataaaacaaaataaaaactatgaaaaacacaaaagtcaaattagagattttggttgtagaaccttccctgagtttctgtgtaaaacatcaaattttaaaaaggccatttaaaagttgacctaaaggcgttacgttacccctcctcactgccacgggaaatgcatttaacataagaggctgcacccactgaaatggctctggggctgtgaaatgccaatccgcctgtgtctatgccatacgataacctcaggcactgcagcacatgaccttaaagtattaacattttatcttgacctgccattatgtaacacatgatactatagaccaaatgtagactaataatttcagttattaataaatattatatt

SEQ ID NO: 1057 - DNA, 475 bp, Mus musculus
gtgcgcgggcttccttttttttaggaaggctaagagaagttttcatcctgacttatacgatgtagctgtgttgtggtgagacatgttttcccttcctcctgcaggagcaaacagcggtgtgtatctgtcagtggaaggactggtttcatctgtgcaacaagaaataaaatttaagaagcagaaagtgaaaaaacatgatattgcaattcaagaaaatggaaatggtttggaatattttgaaaagacgggacactgtacagcttgcctcactgggcagtaccctgtggagctggaatggtagctgcctggacagatgtgttgcttccagactgtagggtcatcaagaagtggtctacatactgttgttactcaggtggtaccaagtggataccacatgcttatgtatgtatactttaagctttgagattttctgaggttattattaaattgctatattgaacctgaagattacatg

SEQ ID NO: 1058 - DNA, 532 bp, Mus musculus
ccattaaaaagctaatgaagttaaaatattttaattaaaatgctcaaagaaatgaagtaggaaaaactaatgcaagtattccttcatgttagaatttgtgacacaaatattttcaacttttaacagggcaagtcgatatgttccaagctgcctcttttcactaggagacatcggtaattttcaaaagcacatttacaatgctttcccatcacccttgctgtgtttttgtagcacctatagccataactggcacctggggcccttacattgctggcagcgtcccttgcatttctttggagtctattcaactgctgtggttttacttagaagtcagtgctttgcatatatgatttcctgagactgtttgaatagtctttctcagaaaactgtgccagtctggcagtgaacagctcttctcgaggcgagctgacagtagcctggttggtttgtatgcttggacctgggtttctagccatactccctgctccctcttctcttgttgctgccctaatgacatcattacccacatctt

SEQ ID NO: 1059 - DNA, 604 bp, Mus musculus
gtccgggagccgcccgaccatgaagacaccgtggaaggttcttctgggactgcttggtgtcgctgcgcttgtcaccatcatcaccgtgccaatagttctgctgagcaaagatgaagcggcagctgacagccgcagaacgtattcactagctgactatttaaagagtacctttcgggtcaagtcctactctttgtggtgggtttcagactttgaatacctctacaaacaagagaacaatatcttgctgctcaatgctgaacatggaaacagctccattttcttggagaacagtacctttgaaagctttggatatcattcagtgtcacctgaccgactgtttgttctcttggaatacaactacgtgaagcaatggagacattcctacacagcttcatacaacatttatgatgtgaataaaagacagctgatcacagaagagaagattccaaataatacacagtggatcacatggtcaccagaaggtcataagttggcatatgtctggaagaatgatatttacgttaaagttgaaccacacttacctagtcataggatcacatcgacaggagaagaaaatgtaatatataatggaataactgactgg

SEQ ID NO: 1060 - DNA, 148 bp, Mus musculus
ggggttaaaagggctgctcattacagtaccaatgcagggattacaagttagaccatgatacaatgctgcagagtctctcttcacagaccctgtgcagggccctgagcactggtctctgaagccagcggcttttgggataccacccatt

SEQ ID NO: 1061 - DNA, 425 bp, Mus musculus
agggtctaaaggtaacctgatgccatagtgctgttggaccgggagcagggaggcaaggacaagctgcaggcccaggggatccggctccacgccgtgtgcacgctctcccaaatgctggagattctccagcagcaggaaaagatcgacgctgacatggtcgggagagtgaagaggttcattcaggagaacggtttctcagcagctaatcataacggtctcccccctcctgagaagaaagcgtgcaaagaactcagctttggtgctcgagctgagctgcctggaacccacccggttgcctcaaagctggtccggctcatgcagaagaaggagaccaatctgtgtctgtctgccgatgtgtcggaggccagggagctggtgcagctcgcagacgccttgggacccagcatgtgcatgctcaaaactca

SEQ ID NO: 1062 - DNA, 488 bp, Mus musculus
ttggggtttgggggttttttttttttttgctaaatgcagctaggttgtgaatatttaattttgaacttttgataaatgagtatcttgatttaaacaggggtctgggaatcactggagattagacactgctgtccgtactcaaagccatcatttatccgggggagggcagggtcctttcaggcttcttccgagcagccacaggaatggctaagggacgccaagcccacgcagtatcactgaaacttgattccctgagccagagggagggacgtgctgtagttgatggtacatgtggatctcctcatgtactgcttccaggcgtcgctgccagactcccggccaccggcagtgtgcttctctccgccaaacgcaccaccaatctcagccccggtgggaggaatattgacgttcacgatgccacagtcggaacctttaggtccaagccaggggaagattctgcccaaatctttggtaaagatactacttga

SEQ ID NO: 1063 - DNA, 499 bp, Mus musculus
acgcgtgcgggcatggaccaccctggcaattacagtggaacccaccattgtgaccggtcttgcccatgatgcgcccattgttcaccaggagacttttgccccaatcctctatgtcttcaaattccaggatgaagaagaggtctttgaatggaacaatgaagtaaaacagggactttcaagtagtatctttaccaaagatttgggcagaatcttccgctggcttggacctaaaggttccgactgtggcatcgtgaacgtcaatattcctaccagcggggctgagattggtggtgcgtttggcggagagaagcacactggcggtggccgggagtctggcagcgacgcctggaagcagtacatgaggagatccacatgtaccatcaactacagcacgtccctccctctggctcagggaatcaagtttcagggatactgcgggggcttggcgtcccttatccattcctgtggctgctcggaagaagcctgaaaggaccctgac

SEQ ID NO: 1064 - DNA, 530 bp, Mus musculus
cccacgctctaggggcggggctcggagccgcccagcccgcgcgcgccctcctccctcgtccctcctccctccgcccccgccgcacctccccctcctcccgcgtctgcctaggctgctccgcggcgcgcctcgcactcggagagccgcagcggcagcggcgcggctcgctttcggagacagagccgggccgcggggacaccgagcagccgccgcgaggacgcccagggcgcgcgccgcactcgccctccctcggcctcggccggcactgctgagcagacaccatggcccgcggaaaagccaaggaggaaggcagctggaagaaattcatctggaactcggagaagaaggagtttttgggcaggaccggtggtaggtggtttaagatccttctgttctacgtgatattttatggctgcctggctggcatcttcatcgggaccatccaagtaatgctgctaaccatcagtgaactgaagcccacataccaggaccgagtggccccgccaggattgacacagattccccagatc

SEQ ID NO: 1065 - DNA, 576 bp, Mus musculus
gtgcgggtctacatcgcgagcggccgccctttttttttttttttttttttttttttttttttttttggaaagggttattcttttattggccggtgggttaacctgactgacacaagatcaacaagagcactggactccgggcaattattacatatgctagaacatggatttgcactggagacaacacttaacaccagtctatggggtactgcattgctttttataaaggccaaaataaagatttttattttcaaacaagggactttggttttatttaatacattacactttttcttgcagaaaaaaataaaatgggacaacggcataaatataaaatcctcccaccatgaaaaggggcaaaacattcataaggacgcagcaccagcgcatgatgcctccagagaaaacaaagatggaaaggaattggacgaataagcaaactacccagcccatcactagccacagggacaggcagatcccagtctcagacacaggtgcagaacacactggaggacacggggagagatggcgagacatccttcagcacggagcacaacacaacccatcaccttgatt

SEQ ID NO: 1066 - DNA, 575 bp, Mus musculus
gcaatttacaagcacaacagctactttcgcttggggttttagggaagttctgaggaatagactcacagactgcagatatattatctagctctcaggggagctagctcccaccatacaaacagacctacttgtgtcctctgggcctgtgtagctagcagtcttctggttttttttttaaagatttatttattatatataaggacactggagctggcttcagacactccagaagagggcgtcagatcttgttacagatggttgggagccaccatggggttgctgggatttgaactccggacctttggaagagcaatcgggtgctcatacccactgagccatctcaccagccccagtcttctgttttggactacccaattccttaggtactctgcttgccttgctcacaaatgctggcctcacattgcctgccttatcagcttctatcaagttctttggctggccctgtctgtgttcacattctgagaacagcagggtccactgccctctctcctttgccagagtgagcccccacacctgatgcctttgggctactgaggagcggacgcgtgggtcga

SEQ ID NO: 1067 - DNA, 586 bp, Mus musculus
  misc_feature (1)..(586): n is a, c, g, or t
gtgcgcgcctcagtagcccaaaggcatcaggtgtgggggctcactctggcaaaggagagagggcagtggaccctgctgttctcagaatgtgaacacagacagggccagccaaagaacttgatagaagctgataaggcaggcaatgtgaggccagcatttgtgagcaaggcaagcagagtacctaaggaattgggtagtacaaaacagaagactggggctggtgagatggctcattgggtatgagcacccgattgctcttccaaaggtccggagttcaaatcccagcaaccacatggtggctcacaaccatctgtaacaagatctgacgccctcttctggagtgtctgaagacagctacaggggacttatatataataaataaatctttaaaaaaaaaaacagaagactgctagctacacaggcccagaggacacaagtaggtctgtttgtatggtgggagctagctcccctgagagctagataatatatctgcaggctgtgagtctattcctcagaacttccctaaaacaccaagcgaaagtagctgttgtgcttgtaaattgcaaaananaaaaaaaaaaaaaaa

SEQ ID NO: 1068 - DNA, 507 bp, Mus musculus
gtttgtttgttttaaaaaaggcagctacgagatccactattttagagtttaagtcatctctggttgacatagcgctggctgtcctatgcttgctggtggcggatttactggtcagactcacaatcctccacaactacggtccacggggattggaactctgcggtccaagttctcctcggcagttttcatcaggatggcaagtcggcttccagagacccttcctttctgaactgcgctcatcagctgcagaaactcgtgcagctcaacctgtccatttttgttcaaatctacttcgcagagaatttcatgcagtgtgttttcgtccatttgtacattgatactctctaggacacgctgaacatcaacaatggtaatgaagcctttttcatcttcatcaaacttgtgaaatctcttcttgtacctatcgatgtctgaaggcagcaggctgatttcagtgctatctgtaagttgttctgttcgagacttgtagcccatttcatagtacag

SEQ ID NO: 1069 - DNA, 533 bp, Mus musculus
gtccgcctgaaaccggcaaagagcgagtgagcggtgcgcggtgcaaggatgtgctcacagggcaggaatttgacgtgagagccaaatgcgttatcaatgcctccggccctttcacagactccgtgcgcaaaatggatgataaaaacgttgttcccatctgccagcccagtgccggggtccatattgtgatgcccggatactacagccctgagaacatgggacttcttgatcctgcaaccagtgatggcagagtgattttcttcttgccttgggagaagatgacaattgctggcaccactgatacgccaacggacgtcacgcaccatcctattccttcagaagaagacattaacttcatcctgaatgaagtgcggaactacctgagttctgacgttgaagtgagaagaggggatgtcttggcagcctggagtggtatccgtccccttgttaccgatcccaagtctgcagacactcagtccatctctcgaaatcatgttgtggacatcagtgacagcggactcatcacaatagca

SEQ ID NO: 1070 - DNA, 486 bp, Mus musculus
ataaaaaaaacccactttattgatcagcattggtagttttttataaaaatcaggcctgtggaatgggaggggtgtggtcaccccatcagatggaagcactagggccaggggggcacagaaccttgggactggctaccttcgtctgtgtggggattgacaggacccacacagacaggtgcttagagggatgaggtcccccaggctctctactccttggcaatggcgaagggtttctccacttcgatcttgccggagtcgacaatgatgacatccttcaggggcttggcccggctgtctgtcttggggctctccaccttccgtaccacatccatgccctctagaactttgccgaaaaccacatgcttgccatccagccaggaggtcttgactgtggttatgaagaactgtgagccattggtgtctttgcctgcattggccatgctcacccagccaggcccgtagtgcttcagcttgaagttctcatct

SEQ ID NO: 1071 - DNA, 521 bp, Mus musculus
gtccgggtcttgctgctgccggtggatgctgcgcctctcggagcgcaatatgaaggtgctcttcgccgccgccctcatcgtgggctccggcgtcttccttttgctgcccggaccctccgtggccaacgataagaagaagggacctaaagtcacaggcaaggtatactttgatttacaaattggagatgaatctgtaggacgagtcgtctttggactctttggaaagactggtccaaaaacaggggataattttggagccttagctacaggagagaaaggatttggctacaaaaacagcaaggtccatcgtgtcatcaaggacttcatgatccagggtggagacttcaccaggggagatggcacaggaggaaagagcatctatggtgagcgcttcccagatgagaacttcaagctgaagcactacgggcctggctgggtgagcatggccaatgcaggcaaagacaccaatggctcacagttcttcataaccacagtcaagacctcctggctggatggcaagc

SEQ ID NO: 1072 - DNA, 522 bp, Mus musculus
ggttttttagacgggacattgtttattactgtccatgtccagtaaagtgactttgtgtcaacagcctctcactttttcttcttgcctttaggagtttcaatgggtttcccctcagccaaagccaactgtttctttagatccaagagtttagccacctctgcagcaacctggttcttggctgccttctgtgctttcagttcccggacgacgttgccctgcttggtcacctcatccgtcagcgtttgtatgtgctgcgagcctgctgctgtaactgcctccacagctgctggcttgggggagcctttagcctgaccccctccaaagcgctgcctcaaattttcaatctggtcattttccagtttttggaacaaaggactgactgtgccaattcggtggcctgctggcaaggtacaaatgaagcttgtggcaaggatgcggcaggctgcaggtgggagctgcagctgggtctggatggtagagctgactgtgggcatgtatggctgcagcatgacagacagcaag

SEQ ID NO: 1073 - DNA, 333 bp, Mus musculus
gtgcgccttacccggcctaaggtccctgtcttgcagctggatagtggcaactacctcttctctgctagtgcaatctgccgatatttttttctgttatgtggctgggaacaagatgatctcaccaaccagtggctggaatgggaggcaacagaactggagccagttctgtctgctgccctacactgtctagtggttcaaggcaagaaaggggaagatatacttggcccacttcggagagtcctgactcacattgatcacagcttgagtcgtcaaaactgtcctttcctggctggggacacagaatctctagctgacattgttttgtggggagca

SEQ ID NO: 1074 - DNA, 100 bp, Mus musculus
agggggggaaactaaatttattcccaccttgggggctgaaggaagaacaaaagcaagaggcgggtccccgggcccttggccccgaaaaaaagggccaggc

SEQ ID NO: 1075 - DNA, 575 bp, Mus musculus
ggaagttgtctgactattttccaaaaccataccctaaccctgaggctgcaagagctgctaacaatggagctttaccccctgacctcagctacatcgttcgagctaggcatggtggtgaggactacgtattttccctgctcgctggctactgtgagccccccactggggtgtcattgcgagaaggcctctatttcaacccttactttcccggccaggccattggcatggctcctcccatctacacagaagtcttggagtatgatgatggcaccccagctaccatgtcacaagtagctaaggatgtcgccaccttccttcgctgggcatcagaaccagagcatgaccatcgaaaacgcatgggtctcaagatgttgttgatgatgggcctgctgctgcccctgacctatgccatgaagcggcataagtggtcagtcctgaagagtcgaaagctggcttatcggccacccaagtgaccctgttcagtatctgcttgtcatcttgccagaacaagctctcagcagcccaggaacagtccatggccttctcaggcctggcccttttcatcaggtacaagg

SEQ ID NO: 1076 - DNA, 593 bp, Mus musculus
ataaatagaaaaattgtttacaaaacaattacctggacagttcactgggtactagactgaagagaacggcccatgtttttgtcttccatcgaacaccccaacactctccactacctgccatttcttccagccttatccacaccaccccgtttctcctgaagactgatttgcttagcaactgcactgagccaaccctgaagacacatgattattggttgggctccattaaacaacaagcctagtgcttgggaaggggggtggggaggggaagagacgtgagaagcatgttggcgtagaccttgaggcatggatgaagcatctgccggcctgacctggtacagggtgggcatctgcactgcagcaagggctgcaggtaaactgaggtaaggaagaacatggtgacctttctgcccagcttctgggccagcacagcagtgtgtgctctgggctgtgggcaccgaaggactgggcttcttgcagttgctgccggcatttctccctctggtgagaagaagagtcccagaagaccagccacttgtcttcctctgaggtacaaatccaacagagccttagccccaaggatctagcaccca

SEQ ID NO: 1077 - DNA, 596 bp, Mus musculus
aacagtctttcaaatcttgatcaagatttgcccaataacatgatccatcaggtgccaatcaaatcgctccctcaggaatggctttggtgtgaaacgtggtgtgatgacgcctctaagaagcgggcaaagaccatcgacctgtgtaataatcccatgactaaggagcccaaactggaggctgccgtgcggatcgtccctgagtggcaagactacgaccaggagatcaagcagctgcagaccctcttccaagaggagaaggagctggggaccctgcatacagaggagacgcaggaaggctctcagaagcatgaggaattatgatctctggaggaagatgggaaacccaccttgacagtttggactaactgctgttttctctgatctttcgatacgactgctgatgaacggattgggcaggtgtaccacacctattgatctgagcattgatttagactactgcaccctagtgggtgctagatccttggggctaaggctctgttggatttgtacctcagaggaagacaagtggctggtcttctgggactcttcttctcaccagagggagaaatgccggcagcaactgcaagaagcccagt

SEQ ID NO: 1078 - DNA, 572 bp, Mus musculus
aaagcttttcattactttttggggggttggggatcacacagaagggaggcagggagggaactacaatccttggttcagattgagttatacaggaaaagataccttcctggtcggttcccatgctaaaaaggaaaaagaaaacccacttataattctgcacaggctccactatgtgagccagctatcagccttttggtcagcatccccagtgatggacatacccggcttgtcaggctgcagacacccacttcacaaaaccctcttccctcttcccccaaagcctctttccttctggtaggctataaaacaatatccgtcactaacaggagagtgttcaacactttgaccatgacaggcttcaggaagtttcacagtttcgttatgctctagtttattactatcatatttacatttttattttattttttattttattttattttatttttttgctgaactgctgattttcctttttcaatagaatttaattctggagtgtgagcagggacctactacattcattgtccaacccccactggtgtaagactccagattcttggcatgtgagtcag

SEQ ID NO: 1079 - DNA, 499 bp, Mus musculus
ttaaggctttcttcgagagtcacccagctccttcagctgagcgcaccatccagcagtgttgtgaaaatatcctgttgaatgctgcttggctcaagcgagatgctgacagcattcaccagtacctccttcagcggaaaacctccccaccctcggtgtgaggcctcctccgcacctgggcctcactgcctctctgcagggatgaggtggagctaccaaacagctgactcacatgccaagaatctggagtcttacaccagtgggggttggacaatgaatgtagtaggtccctgctcacactccagaattaaattctattgaaaaaggaaaatcagcagttcagcaaaaaaataaaataaaataaaataaaaaataaaataaaaatgtaaatatgatagtaataaactagagcataacgaaactgtgaaacttcctgaagcctgtcatggtcaaagtgttgaacactctcctgttagtgacggatattgttttatagcctacc

SEQ ID NO: 1080 - DNA, 316 bp, Mus musculus
gggtaaattgtaattttttttattggaaaacaaatatacaactctggagtggatttgaggcaagttgtgccatgagcaggttttctttaagtggctaaacaaagtttaaaaagcaagtaacaataaaagaaaatgttcctggtacaataccagcagtacaaaaaaatagtgtgcgagtacctggataaaacacccgttttgcaatagtgcaacttttaagcacatattgttgactgtgcacagggcacgcagagttacaggtgtcacacttgaacaacaacatgctgacagtgtctaaaagctactttaaaaaagg

SEQ ID NO: 1081 - DNA, 500 bp, Mus musculus
cgagtcgagcggttgtctggtcgcgtctcggaaacccgtagcccttgcagcatggctgaccaactgactgaagagcagattgcagagttcaaagaagctttctcactatttgacaaggacggggatgggacaataacaacaaaggagctggggacagtgatgaggtccctggggcagaaccccacagaagcagaactgcaggacatgatcaatgaagtagatgcggatggtaatggcacaattgatttccctgaatttctgacaatgatggcaagaaaaatgaaagacacagacagtgaagaagagattagagaagcattccgtgtgtttgataaggatggcaatggctatattagtgcagcagagcttcgccatgtgatgacaaaccttggcgagaagttaacagatgaagaggtcgatgagatgatcagggaagcagacattgacggggacggtcaggtaaactacgaagagtttgtacaaatgatgacagcgaagtg

SEQ ID NO: 1082 - DNA, 620 bp, Mus musculus
catggaaaaaaagatttttaatttttaaatatataagtttgcttaatttctgatgagctgttcaacactgttttaaatatcctgaattagtaactatgccaacaaatttacctccagtgtttccacaggagacattaaaataagaccaaattatagttttcttcaaccaaagcagtcttttctcagtcctttttgtgcaaaaatattacaagagcaactcaaatgggaacgctgaaatgacatgccaacatttcagggcacatttaaaacactcaataattcttgaagttactgtatcctaaaatattactaccaaccgtttatagattagttctgtatatctactcagacagatgcatattcctagacctctgaaaataaacaggctcattggtctcttttggtgtccacacaataggcaagataggtttacaatagtgtttaaatcaaactacacatctacaatctcctgactccaccacattcaaaacaaaagtcagagtttatttggctaccttgaaatcattcccataaacctgctacggttcactggacctgaacatttctcagaaatgtgtcgtttatcatttcacctaagtgatgattagggatcctttaaa

SEQ ID NO: 1083 - DNA, 598 bp, Mus musculus
gtgtttaaaatgtttccactatgttgaggcagttttttaaagtggaacacagataggatttttagtatttctttttttgtttctttggtgattaaaggtttgttggtagacatttgtgtaaaagttgttcaagcctatcatctttccagtacttgtggtcctgttcttagtaccagagtccacaatggaaagtgtaaacactggatattaatattgctgagggtgcatagccaggtgtgagctgactggaacttctcagtggtgaagaaacagcacaacggcacttgccattttcatagtgattgcataaagagaccttctaagtttgtctggattgagtgaacactcttctaagaggagcttctcaagtaaatgcaaaggaaaagagttgactatttttatagcatatttaatatatttgtatataactatgagtgtagtaggaaccctccacatgcctcccacttttctaattccctccccttctgccgtagccctagtccagcctcatccgcatgggtaatgtgcctactgtcagcctacctaccaaaagatagtgctgctgctttctgagacaggtgagatcagactctcatgc

SEQ ID NO: 1084 - DNA, 362 bp, Mus musculus
  misc_feature (1)..(362): n is a, c, t, or g
ctgtcttacaaactttattagtgctgggaaaacggggacaagaagctcttgtctcttcagtccactactgtttgccattgccattgatgggacggttcacatgttccggggaggacagaaaggccttgatcttgggccgggcactgaggcgagccacataggcagagagcagggggaagttgtccaggcagccaggggccaggacttggtggatcagcagcaggtccagcaagttgtaatcggcaaaggagatctggtcacccacgatgaaagctttgcctccctggttctgggacagcagggnctcaaaaggcttcagatgcccaggcagggccttcacgtagncattcttaccattctca

SEQ ID NO: 1085 - DNA, 769 bp, Mus musculus
  misc_feature (1)..(769): n is a, c, t, or g
ccctctgtctacgcagcactgaatccgcacccagcaggcatgccaccatacaccattgtctacttcccagttcgagggcggtgtgaggccatgcgaatgctgctggctgaccagggccagagctggaaggaggaggtggttaccatagatacctggatgcaaggcttgctcaagcccacttgtctgtatgggcagctccccaagtttgaggatggagacctcaccctttaccaatctaatgccatcttgagacaccttggccgctctttggggctttatgggaaaaaccagagggaggccgcccagatggatatggtgaatgatggggtggaggaccttcgcggcaaatatgtcaccctcatctacaccaactatgagaatggtaagaatgactacgtgaaggccctgcctgggcatctgaagccttttgagaccctgctgtcccagaaccagggaggcaaagctttcatcgtgggtgaccagatctcctttgccgattacaacttgctggacctgctgctgatccaccaagtcctggcccctggctgcctggacaacttccccctgctctctgcctatgtggctcgcctcagtgcccggcccaagatcaaagcctttctgtnctccccggaacatgtgaaccgtcccatcaatggcaatggcaaacagtagtggactgaagagacaagagcttcttggtcccggtttcccagcactaataaagtttgtgagacaggaaaaataaaaanaaaaaaagggctggncgatc

SEQ ID NO: 1086 - DNA, 466 bp, Mus musculus
aatgccaaataccacggaatcttccaggcagccaagcagatcctgcaagaggaaggcccaagagcattctggaaaggacacgttccagcccagattctgtccataggctacggagctgtccaatttttggcctttgttgagttgactgagctgctctaccaagccaacttgtaccaaacgcaccagttctcagcgcactttgtgtgcggcggcctgtctgctggcactgccaccctcaccgtacaccctgtggacgtcctgcgtacccgccttgccgctcagggcgagcccaagatctataacaatctgcgagaggccatacggaccatgtataagaccgagggccccttcgtcttctacaaaggcttgactcccaccgtgatcgccatcttcccctacgcgggcctgcagttctcctgctaccgctccttaaaacgtgcctatgactggctcataccaccagacg

SEQ ID NO: 1087 - DNA, 253 bp, Mus musculus
aacctaaagggcaaaaaaaaaaggggggggggggggccccccaagggggaaggggaaaaacggggaaaaaggcccgcccccggcggccccccaggggggcccaaaaaggaaagggggcattccccccaaagccgggacgggaaaaagggggggcccgtccctttgggatggggcggggggggggggaaacccacgccccccaggtcccccccccaaggcctttttttaacaggggaagccccccctttttttt

SEQ ID NO: 1088 - DNA, 377 bp, Mus musculus
agcgggagagacatttattggacgttttggccataggttgttcatctgccggggggtttttcaatgaagccatctcaagtccatacaggaatttaggaggcagagacggggttagtccacctataatccccgacaggggagtacctggccattgttttttttttttttgccagggattactggtaacataataataaaaacaaaaccaaaaaaacaaaaaacaaaaggcctttgttctgaccacccttcagtcttttggtggatggcaaatatgcaaactgtttaagtacatatgcagttttgttttcgttcagttaaaaacaaacctgtttcctctactggtttgctcagctcaacagggggagaggggctgattt

SEQ ID NO: 1089 - DNA, 437 bp, Mus musculus
cagatcgtgctgctctggaggagctggtacgactccagggagcgcatgtgaggggccttaaggagcagaaagcgtccgctgagcagatcgaggaggaggtgacgaaactcctaaaactgaaggcacagctgggccattatgaaggcaaacagaagtttgtgctcaaaacccccaagggcacgagagactatagtccccggcagatggcggtccgggaaaaggtgtttgatgtcatcatccgctgtttcaaacgccatggagcagaagtgattgatacacctgtgtttgaactaaaggaaacactgactggaaagtacggagaagacccaaagcttatctatgacttgaaggaccagggtggggagctgctgtccctccgttatgaccttactgtcccttttgctcgctatctggcaatgaataaactgaccaacatt

SEQ ID NO: 1090 - DNA, 244 bp, Mus musculus
ggttttttgacacagggtttctctgtatagccaagatggcctcgaactcagaaatctgcctgtctctgcctcccgagtgctgggattaaaggcctgagccaccactgcccagcgctgctgcttcttcttcttttctgtcagctgttgagttacgactttacacagcattttcataaaaccagtaggtgactttctttaattattttgttaaaactccagtttgttttccagagatataagcttc

SEQ ID NO: 1091 - DNA, 401 bp, Mus musculus
tttaatgccctagttaggattgccagggaagaaggagtccccacactgtggcgggtgagtgcgagggttggagtcttgggccatgctgggttagatctctggcacttttgactgtctccattgcctccaccctccacctccagggctgcatccctaccatggctcgagctgtcgttgtcaatgccgcccagcttgcctcttactctcaatctaagcagctcttgctggactcaggtgagagacccagagctgagaacttgagcctggcctgagctacctgagagttgactaccaccttttgcttcacctcccaggctacttctctgacaatattctctgccacttctgcgccagcatgatcagtggcctcgttaccactgctgcttccatgcctgtggaca

SEQ ID NO: 1092 - DNA, 292 bp, Mus musculus
gtttttcattttagctttttattaaaatgcttaggatacagactgaccttttgtaaatgacagttttacttttgctgaaacaggacacatgtgcactctgataaacagaatgaagagtctcagttcattggagcccctggccatggccctggcagagttgcacttgctgcagcaacctcttttggccaccttacttaagacggtgttctgtgcagcatgaagcagactggtgccactgttcagccatctttctccggtggccagaataaaccactttcacaaagagccaccc

SEQ ID NO: 1093 - DNA, 463 bp, Mus musculus
ggcggacccggggactgctggtctgtgtgctctgagggagggtcgcgccgccagccaccgccggaggagcccctcgggccgttgtaagcatcaataatgtctttcatctttgagtggatctacaatggcttctgtagtgtgctccagttcctaggactctacaagaaatctggaaaacttgtattcttaggattggacaatgcgggcaaaaccactcttcttcacatgctgaaagatgacagactaggccagcacgtaccaacactccatcccacttcagaagaactgacaattgctggaatgactttcaccacttttgatctcggtgggcatgagcaagcacgtcgcgtttggaaaaattatctcccagcgattaatggcatagcttttctggtggactgtgcggatcattctcgtctcatggaatccaaagttgagcttaatgctttaatgactgatgaaa

SEQ ID NO: 1094 - DNA, 640 bp, Mus musculus
aataaaacaatttgaggctgtataaaaactttagtaaaaaattagctttgagagcccacagacttttactatgaactattgctggcactcctccccagccacaggcccacggcccaggactggagcgccagagaagaggggcagggtatatggggtagggctgtggactgttgggacaaagtggccaaggtcaagtgaggaaagagcatcacatgacataaaaatattgcatcttcaccaaaatgtcccccactgagtgtttcaaagaccgtgatattccttttaagagggaagggaaagaacagaaccaaaccaaaccaaaccacagagaagggaaaagaaaggttgatgaggtggagtccttcgaccttcccaggtgcccctacgagcagctggcccaccttggagcacctaggttggaggccatagccaccaatgccttttggagtccctttcccacagaaatgaagacccccttggtggtaggccactagcgtgcatggggtagaggtcaggatgtccatggcccaagaggcccctccagcttccagcccctggcaacagcgggagagcgaacccagcaccagggccctggcacccgagccaggaccaggaggcctcagtcaggctctgggatatc

SEQ ID NO: 1095 - DNA, 575 bp, Mus musculus
tttgttcatagaaaagtcttcgctgcgttttttgatggctctgaagcactgtttgagtagaggtagaaggagggagcgaggaaccgtgaatgaactcgcaggcagtgctgggcggccccggctctctgcattttgcctttaacactaactgtactgttttttctattcacgtgtgtctagctgcaggatgtaacatggaaaacagtagctaaagattacattcaaaggactttcagaaattaaggttaagtttttacatttaatctgctgtttacctaaacttgtacgtataatttttgggtgggtatgggaaattgctttgctaaaaataagatcccagggtgtttcaaacttagagaagaccaagggacagtattttttatcaaaggaatcctattttttcacactatgtcaacttggttgctctgatatcccagagcctgactgagggcctcctggtcctggctcgggtgccagggccctggtgctgggttcgctctcccgctgttgccaggggctggaagctggaggggcctcttgggccatggacatcctgacctctaccccatgcacgc

SEQ ID NO: 1096 - DNA, 711 bp, Mus musculus
gggtaccaaaattctttatttgaagaaatggtacaaattaaagaacttaagcagatgttttggtgcaacttatagaaaagatgaaggcagcctgacatgcatgcactgcctcagtgaccagtaaagtcacgtggctttggggaagtcagcttagctctcatcaccgtgtcccagggtgtgcttgtcaaagagatattctgccatgccagcttcaggggcacccatcttgcgtaagttggtcacgtggtcacccagttctttaatggatttcacctgttcactcagataatacgtctcaatgaagtcacataagtggggatcattcttgtcagtagccagtttgtgcagttccagtagtgactgattcacactcttttccaagtgcagtgcacactccattgcattcagcccgctctcccagtcatcacggtctggtttctttatatcctgcaggaagattcggccacctcgctggttctgcagcttcatcagtttctcggcatgctccctctcctcatgagattggtggagaaagtatttggcaaagttcttcagagccacatcatctcggtcaaaataacaagacatagacagatagacgtaggaggcatacaactccaggttgatctggcggttgatggcagcctccgcgtcctggtggtagttctggcgcacttgcgagggaaacgcggtggtcatggtggcggcggg

SEQ ID NO: 1097 - DNA, 556 bp, Mus musculus
agagtcgccgcggtttcctgcttcaacagtgcttgaacggaacccggtgctcgacccctccgacccccgccggccgcttcgagcctgagccctttgcaacttcgtcgttccgccgctccagcgtcgccatctttcctcgccccgccgccaccatgaccaccgcgtctccctcgcaagtgcgccagaactaccaccaggacgcggaggctgccatcaaccgccagatcaacctggagttgtatgcctcctacgtctatctgtctatgtcttgttattttgaccgagatgatgtggctctgaagaactttgccaaatactttctccaccaatctcatgaggagagggagcatgccgagaaactgatgaagctgcagaaccagcgaggtggccgaatcttcctgcaggatataaagaaaccagaccgtgatgactgggagagcgggctgaatgcaatggagtgtgcactgcacttggaaaagagtgtgaatcagtcactactggaactgcacaaactggctactgacaagaatgatccccacttatgtgacttcattga

SEQ ID NO: 1098 - DNA, 142 bp, Homo sapiens
atctttattataaatttttattcatatcattactatttgataagagttcatcaaccaggggacgctgtgggccgaaagagaaaaaggacacccacggacgcccccagaaaaggggggaaaaagaaaaaaaaaaaaaaaaacc

SEQ ID NO: 1099 - DNA, 563 bp, Homo sapiens
gaccttcaaggctccaccatgttctcgcgggcgagcgttgtcgggctgtcggcctgcgccgtgcagccgcaatggatccaagttcgaaacatggcaactctgaaagatattaccaggagactgaagtccatctaaaacatccagaaaattaccaagtctatgaagatggtggcagctgcaaagtatgcccgggctgagcgggagctgaagcctgcccgagtgtatgggacaggttctttggctctgtatgagaaggctgatattaaggcacctgaggacaagaagaagcacctcattattggtgtgtcctcagatagagggctttgtggtgctattcactcctcagtggctaaacagatgaagaatgaagtggctgccctcacagcagctgggaaagaagttatgattgttggagttggtgaaaaaatcaagggcatactttataggactcattctgatcagtttttggtgtcattcaaagatgtgggacggaagcctcctacttttggagatgcatcagtcattgcccttgagttgttaaattctggatatgaatttgatga

SEQ ID NO: 1100 - DNA, 446 bp, Mus musculus
cctgggccagccagctctttattcctgtcccacttcggagaagcagggattgcagtgggtagctagtcactgtccacagtgaaggtgaaggggctgagcttgtagccggtgcctgaatagaacttgttctggaactccacccagtgcaaccgcagggcatgcaggaaggctgagagcccctccatcactaacaggatggccacagtcaacacagcaaaggcagcaaacacagggaccagcaccacagctgccacgccgatctctcggcccatgcccaggcctatgcgcatcaccatggcccacaggacctcagacagctgggcatgggccaggctcagggcccagagacgcaagtaggaggctgtgttggagatgcagcccaggcagaactcaatggtgtggattgcttggtgcatgaagatctcagaagggacaaactcagtttc

SEQ ID NO: 1101 - DNA, 444 bp, Mus musculus
cgaagttgagcgaagagtccacctgggatcatgggctctatgttccggagtgaagaggtggccttggtccagctcctgttgcccacagggtctgcttacaactgtgtgagccagcttggtgagctgggcctcgtggtgttcagagacctcaacgaatccgtgagcgccttccagagacgcttcgtggtagacgtccggcgctgcgaggaactggagaagacgtttaccttcttgcgggaagaagtgcagcgggcaggtctgacgctggccccacctgaggggacactgccagcaccacctccccgagacctgctgcgcatccaggaggaaacggatcgcttggcccaggagcttcgggatgttcgtggcaatcagcaggcactgcgggcccagctgcaccagctgcggcttcactcggctgtgctgggccagagccacagcccg

SEQ ID NO: 1102 - DNA, 317 bp, Mus musculus
catttttagctgagtctgaagagtttattgccttctctgcttcgtagagaacgtagcatgtttcttcagcacaccttttgaagcgcatcgagcatggctgagtgtgttgtatctctactgttagtccacttctcaggaccaaatcatcaactgttccaaggtaattagttacttcttgcagtccttggacaccatgcttatgttcactaattttctcctttcagtataggcagcaattcaccgttgtctttcaggtccttgacaatagccaagccgccaacaagatcccctctcacatacagctgagggtaggttgg

SEQ ID NO: 1103 - DNA, 551 bp, Mus musculus
gatggtgcacatgccccagagttgaccaaaaaagtccagcgacacgtgtctagcggagcctttcctcctagtactaatgaacatcttaaagaagacctcagccttcgcctgaaaaagctgactcacgctgccccctgcatgctgttcatgaagggaacacctcaagaaccacgctgtggtttcagcaagcagatggtggaaatccttcacaaacacaatattcagttcagcagctttgatatcttctcagatgaagaagttcgacaggggctcaaaacgtactctaattggcccacctatcctcagctctatgtttctggagagctaataggaggacttgacataattaaggagctggaagcatcagaagagctggacacgatctgtcccaaagcacccaagttagaggaaaggctcaaagtgctgaccaataaagcttccgtgatgctctttatgaaaggaaacaaacaggaagcaaaatgtggattcagcacacaaattctggaaatactgaatagtactggggttgaatatgaaacttttgatatact

SEQ ID NO: 1104 - DNA, 432 bp, Mus musculus
aacagccaaccactaaatttattactcaaacatttgtttcaataaattttgtacagaagggtagtatttattgtatctataatacaaagtaactgctcaacaagctttataaagtatgaagcaataaggtaataattatatgaaatggttctacagaggtaaatgtcagggtaaattgagttgtagcaagaatttatcatatgtacgatgatgctaacattttactatatcagttatcataatgcttaatcctcctaatcgctcaccatcatgatatgcaagatcataaacttttttccaggattggaccaaaacatcataacactgaactacacatataaataggttacaccaatcatgtattcataaaaatttataaaaagccgactgagaatcctgtagttttcactgatgttcagaagaactcaatcc

SEQ ID NO: 1105 - DNA, 586 bp, Mus musculus
  misc_feature (1)..(586): n is a, c, g, or t
tttaacctctcaacatatctggttcccagacactgggtaccaaagatgaatccgatcattcacaaattcctttacacagccgagtacagtgacagctcttacttcagcagcgatgaatcggattgagttcttctgatcatcagtgaaaactacaggattctcagtcggctttttataaatttttatgaatacatgattggtgtaatctatttatatgtgtagttcagtgttatgatgttttggtccaatcctggaaaaaagtttatgatcttgcatatcatgatggtgagcgattaggaggattaagcattatgataactgatatagtaaaatgttagcatcatcgtacatatgataaattcttgctacaactcaatttaccctgacatttacctctgtagaaccatttcatataattattaccttattgcttcatactttataaagcttgttgagcagttactttgtattatagatacaataaatactacccttctgtacaaaatttattgaaacaaatgtttgagtaataaatttagtggttggctgttaaaaaaaaaaaaaaaaaaaaaaaagggcggccgcn

SEQ ID NO: 1106 - DNA, 17 bp, Mus musculus
attttgcatacttttaa

SEQ ID NO: 1107 - DNA, 592 bp, Mus musculus
agcaaggcaaagtttgagaatctctgcaagctcatgaaggagatcttggacaagaaggttgaaaaggtgacaatctccaataggcttgtgtcttcaccctgctgcattgtgacaagcacctatggctggacagttttatggaacggatcatgaaggcccaggcactgcgagacaactctacaatgggctacatgatggccaaaaaacacctggagatcaaccctgaccaccccatcgtggagaccctgcggcagaaggctgaggcagacaaaaacgacaaagctgtcaaggacctggcggtgctgctgtttgaaactgctctgctctcctctggtttctcacttgaggatccccaaacccactccaaccgcatctaccgcatgattaaactaggcctgggcatcgatgaagatgaggtcactgcagaggagcccagtgctgctgttcctgatgagatcccccctctggaaggcgatgaggatgcctcgcgcatggaagaggtggattaaagcctcctggaagaagccctgccctctgtatagtatccccgtggctcccccagcagccctgacccacctggctctctgctcat

SEQ ID NO: 1108 - DNA, 697 bp, Mus musculus
gttttaaaagattcatttattttatgtatatgaatacactgtagctgtcttcatgcaccagaagagggcatcagatctcattacagatggttgtgagccaccatgtggttgctgggatttgaactcaggacctttggaagagcagtcagtgccatgtccccagcctctgtttgtttgtttgttgagacagggtttctctgtgtagctctggctgtcctggaacttgttttgtagaccaggctggccttgaactcagagatctgcctgcctctgcctcctgagtgtgtaaaggagtgccgcagaacacagtagtaactctaacactgtaatcagcaagctctaatcactgtaaccgggttctcctcagctctcctactctacagacacagctctgctttcaccgccatctcattcccatagggctttagcagggggcgcacttcctcttccaggaatctgtggacctgctggggtgctcggccagtgaaagaagaggggtccagcaagtgctccagctgtgagtggatggggctgaagtaggcatctgcccggatgcgctctataaggtcattgtcacctccttccagcttgaccacagcagctgcctgctgggaaagcactctaattttctcatggcagtcctgtcggctgcccccggctttacaccattgccatgatgatgttctcggatagtcga

SEQ ID NO: 1109 - DNA, 721 bp, Mus musculus
agaacatcatcatggcaatggtgaaagccgggggcagccgacaggactgccatgagaaaattagagtgctttcccagcaggcagctgctgtggtcaagcaggaaggaggtgacaatgaccttatagagcgcttttttttagatgcctacttcagccccatccactcacagctggagcacttgctggacccctcttctttcactggccgagcaccccagcaggtccacagattcctggaagaggaagtgcgccccctgctaaagccctatgggaatgagatggcggtgaaagcagagctgtgtctgtagagtaggagagctgaggagaacccggttacagtgattagagcttgctgattacagtgttagagttactactgtgttctgcggcactcctttacacactcaggaggcagaggcaggcagatctctgagttcaaggccagcctggtctacaaaacaagttccaggacagccagagctacacagagaaaccctgtctcaacaaacatacaaacagaggctggggacatggcactgactgctcttccaaaggtcctgagttcaaatcccagcaaccacatggtggctcacaaccatctgttatgaggatctgatgccctctttggtgcatgaagcaagctacagggtattcatattcataaaataaatgaatctttaaaaacaaaaaaaaacaaaaagggccggccgcgaaggacaga

SEQ ID NO: 1110 - DNA, 45 bp, Mus musculus
cctttattttatttattttttttttgtgttttttttttttttttt

SEQ ID NO: 1111 - DNA, 434 bp, Mus musculus
cgagaagctgcaaggatgctgtctgtgcgcgtcgccgcggccgtggcccgtgccctccctcgacgggcgggactggtctccaaaaatgctttggggtcatcctttgttggtgcaagaaatctccatgcctttattttttgacttcagaagactggcacagctgagatgtcctccattctcgaggagaggattctgggagctgacacgtctgttgacctggaggagactgggcgtgtgttaagcattggtgatggtattgcgcgagtgcacgggctgaggaatgttcaagcagaggagatggtggaattctcttcaggcttaaagggtatgtccctgaacttggaacccgacaatgctggagttgccgcgtttgggaatgacaagctaattaaagaaggagacgttgtgaagaggacaggcgccatcgtggatgt

SEQ ID NO: 1112 - DNA, 74 bp, Mus musculus
gggacaaagactacaaagatttaattaaaatcccagggccccaggcagtctgccctgccctgagggcaacctca

SEQ ID NO: 1113 - DNA, 213 bp, Mus musculus
tggcccagagtgctgctgggggaggcccgggtggctgtggacggatgtcgcgctctgttgtctcgccttgccgtgcatttctccccgccatggactgctgtgagctgctcacccctgcggaggagcctgcatggaactgcgacgcgagctttcccgctcatccccatagtggtggagcagacgggtcgaggcgagcgcgcttatgacatatac

SEQ ID NO: 1114 - DNA, 291 bp, Mus musculus
gcagggaagacagaaaggcctcccaggccacttggtttattagatcctgaagagaggtgtaggcagtgcccctgggctgctgcaacttcctgggggaggacctgtgggaggcacagggccgaacctcgttttgatacacacaaccccatttgagggaaaacaggctgcttcgaagcctgagggatggtgaagggtgatgcctgccatacaggaagccaggtcctgggagggcacaaacgatgaatccatcactgccccagctctgccagcatgcccacctggccctgggga

SEQ ID NO: 1115 - DNA, 553 bp, Mus musculus
gcactttggcatcaaagtgccaaccacctgacatggccagggacacctgggccaggctcggtcgctgtgctgagctccttggaagagtgggaagggaacgggctctcttccttggcctgggcccatgctggttttcagcaggctcctgctcttccctgccttgggctgctggctatgccttccgaccctgccttggccccactcaagtggcacctctgccctacttactcccaggctctccccactgggtcaccccgtcttcctatccgatgattcactcagaagaggtctggcctggctggtgtcactgtccccacctccctggctgctaccgtgccctgcctggcaagcccagcgaagccgagttcgtttcctgctcccgctggccctctgtgcagggagcagtttccgcccagaacttgggtagtgtggcagggtacggcccgtggcagcttctgcttaccaaatgactagagcacacacacaagcactttgtcacaagagggaccaccgtgctgtgttctggaaggtagtgccttcaggagaggggaca

SEQ ID NO: 1116 - DNA, 534 bp, Mus musculus
cgtcacaacattgatcttgcgagcttttatttcagtgaccaaaagaatgcagttaatggaatcgatgtctaccatcaggcatgcacctctacctgaaacagttgttagttctgaactggcctaagtcgcggtttctttaggcacatctgtgaatgttttgcatctggatatacatagtaagttaacttcttctcgtggctgtctggtaataagaatagtactcatgagctagattcttttatgactaaagccctttggattctcaggcttcctcttctaccttgagaccatattttcaatttgcgagttaagtaagtcacagtataggggagagacaacctaagaagttggattgcaggaacactccataggactttttttcagctccaggtcagacatgaaagaaagctcacagttaaacagtgccaggatctttccccactgccaatttgactgacacaaagatctccctaaaaaaatcagaaatgaacccatacaaatcaagatttacccgatgtggtcccactagcaaat

SEQ ID NO: 1117 - DNA, 539 bp, Mus musculus
gagtcctccacgtcctcttcgggctcggctctgggcgccgtggaccctcagttgcagcatttcatcgaggtggagacgcagaagcagcgcttccagcagctggtgcaccagatgacggaactttgctgggagatttgcatggataagcctgggcctaagttggacagtcgggctgaggcctgttttgtgaactgcgttgaacgcttcattgatacaagccagttcatcttaaatcgactggaacagacccagaagtccaaacccgtcttctcagaaagcctttctgactgatctcagcattacctctttggaaaagtagttcaagaattgaagagctgctgatgaggtggttgaagaaatggctatgggggggattaaactcccaattttctttatcgtcttgggacatcttgtcacctgagaatgaacaaagaccaatttttatgtatgggagttgagagtcatgtgtatttggttgtgtttttaaagctaaccatgtgacaataattgacagataaatgaaagtgtgagatgcatat

SEQ ID NO: 1118 - DNA, 59 bp, Mus musculus
gcggccgcccttttttgtttttttttttttttttttttttttttttttttttttttttt

SEQ ID NO: 1119 - DNA, 544 bp, Mus musculus
cgcgaccatgaagactcccggcgtcttgctgctcattctcggcctcctggcttcgtcctccttcgcgattatcagaatccctctgcgcaagttcacatctatccgtcggactatgacggaggtgggcggctctgttttagacctgatcctcaaaggccccatcaccaagtactccatgcagtcatcgcctaagaccacggagccagtgtcagagttactcaaaaactacctggatgcccagtactatggcgatatcggcatcggaaccccgccgcagtgtttcacagtcgtctttgatactggctcctctaacctgtgggtcccctccattcattgcaagatacttgacatagcctgctgggtccaccataagtacaacagtgacaagtccagcacctatgtgaagaacggcacgtcctttgacatccactacggctcaggaagcctctctgggtacctgagccaggacactgtatcggttccatgtaagtctgaccagtcaaaggcaagaggtatcaaggtggagaaacagatctttggagaa

SEQ ID NO: 1120 - DNA, 214 bp, Mus musculus
cacaaggaatgcaacagttttattaggagtgtaggcatgtcagggaaatcctgttcagggaggcacagggcagaatggaacactgctcaagtccccagcaggctaacagggcctctacggagatatctaaacaaggtgctacttgtggctgcttctggtgaaatgatttttgcctgaaagagcgctccagcactggtgaatctgaattccatgt

SEQ ID NO: 1121 - DNA, 537 bp, Mus musculus
gaaaggctggtccagcggctgagcctggcgctgtcctgagaaggagcgctcggtgtggaagagatgaaccggacaaaaggtgatgaggaggaatattggaacagctccaagttcaaggctttcacttttgattttgtttatgatgagctctcacagttaaaggaatccaaacgcgcagtgaatagccttcgagacatcgtggatgacgacgatgacgatgacctggagagagtcagctggactggagaacctgtgggaagtatctcatggtccatcaaagagactgctgggagtagcgggtcaacccctgagggacgtgaacagctaaagggccgaaacagcttctacacacagctacccaaacctccttctacttactccctcagcagcttcttcagaggtagaactagacctgggagtttccagtccctttctgatgctctgtcagacacacctgccaaaagttatgctccagagctggggaggcctaagggagaatacagggattacagcaatgactggagcctcagtgataca

SEQ ID NO: 1122 - DNA, 714 bp, Mus musculus
ctaaaaactgtaggctttttattcagttaagaggtagacagatgaacatggaaggctgtcccatgtgaattgtgcccaaagttcacattccacttcattcacccatcccacactgccagaaatctcagaagaataaccacaaccgccagggggctttgtctccctgcttcttagcaacatgtccgtgaactgtttgcaaagaggttactacaaacttatatttccactgtgccaaagattctcggccctctaagaagttgtcacacatcaacagaacctgccactagtgacagggagcagagtgccgtgactatttctatgagagactatgagggagggaagcttcagttacatgttgttaaatccctgtgcatgttggggaagaagctggtgaggccgacaaagcagaatgcatcaaatggctctgcctggctgtttaaaaagaacccacctaagttatctcacagacaacattaaaacatactggaattgaggcctgatacaaaagtagagaaatatgtacaggaattcatagcccaggagaaaagggaccttggaatgaatcaatggaaacctggctattttacatagctaattttgagataagtcatatttagcacaaaagcaattatagtgtaaattacacttccttcccacggctcctttaagacccttgcctggcttcagcaacactgtgagcgttctcctaggaac

SEQ ID NO: 1123 - DNA, 544 bp, Mus musculus
tggtgttggcatttgcatgggcctgtgggtttggggaagaagagttatccagaccatggggaaggacctgaccccaatcacaccctccagtggtttcagtattgaactggcgtctgccttaactgtggtcatcgcatcaaacattggccttcccatcagcacaacacattgcaaagtgggctctgttgtgtctgttggctggctctgatcaaagaaggctgttgactggcgactgtttcgaaacatttttatggcctggtttgtcacggtccccatctctggggttatcggtgccgctatcatggcagtattcaagtacatcatcctgccagtgtgacgctggggttgaaagctgtgtcagtgtctgggaccattgtacacattcctgttcctaggagaacgctcacagtgttgctgaagacaggcaagggtcttaaaggagccgtgggaaggaagtgtaatttacactataattgcttttgtgctaaatatgacttatctcaaaattagctatgtaaaatagccaggtttccattgattcatt

SEQ ID NO: 1124 - DNA, 767 bp, Mus musculus
cacttttataattttattgttttttttttctcttcacatcttttaaaatagaaatagcctatgaacaacagtttcttctcccaaaacctcaattcaattgattgcctcagaaaggctgtcagaacatcacttggaggcacaggtcagtggcacacttaatgcctttgccctggggtcaatccccaacactggagaggggagagacaaaaacaaaaaactacaaatcaaaacttaaacactgccatctcactccctgcacaactactggactcagcaggcagcaagttcaaatttctgcccacaaaaatcagctggtcagtactaaatctgttgtcagccagacttctctctgctcgtctctttgcagttcttccatcagcgaatcccaggctgatgggcatctttcagggcacagtgaaattagaaggagcagtagtcagtcaggttctagtcacctctcctccaccagctggccagctgggaaactatctccagcctcgctcccggctttatcttcttcttccttaagacattgctcgcagttgcacagaacaatgactacagtgtccattaacctgagaagtggtttgagcctgacatctttcctgagctaaaaatgagaaaaagcagagctacggccttcctgccacagggtcaagagagggaaagctctgaagggcagcgctgggaagcaatgaactctcctcaagacgagggacaagagggatgtgctgcagccaagggtacataacagatagacagcctgg

SEQ ID NO: 1125 - DNA, 600 bp, Mus musculus
  misc_feature (1)..(600): n is a, c, g or t
ctgcccatccaagagttccatctgagccgcgtcctgcaggagctgggtctgaaccaggagcagtttgtggatctgtgcatcctgctgggtagcgactactgcgagagcatccgtggcattgggcccaagcgggctgtggatctcatccagaaacataagagcatcgaggagatcgtgaggcggctggaccccagcaagtaccccgttccagagaactggctccacaaggaagcccagcagctcttcctggagccagaagtactggacccagagtctgtggagctgaagtggagcgagccaaatgaagaagagttggtcaaatttatgtgtggtgaaaagcagttttctgaagagcgaattcgcagtggggtcaagcggctgagtaagagccgccagggcagcacccagggacgcctcgatgatttcttcaaggtgacaggctcactctcctcagctaagcgcaaggagccagaacccaaggggcctgctaagaagaaagcaaagactgggggagcggngaagttccgaaggggaaaataaacctgtccttcccctccactgtccttgaccccaggctgtctatctgttttgtacccttgg

SEQ ID NO: 1126 - DNA, 360 bp, Mus musculus
attaaaaaaaaaaaaccagtttattatcagcacaaatgaagagcgactgcccccccaggggccccagtcttcctgtctgagcctggggagcaaccctgtgggggggccccatcttggggcaatgcccttgttcatctgattccagtcccattgctcctggcccagggttaagctccacctcgatatgccaaaggtatgttccccccagagcgactgtcacctccagcatctgagaaaccgctgcctccagaggctggggccacatccacttgaataacaccgtgcacttgggaaagctggggactgtccaggctggcaatgagctggcgggggcctggtcgcacgggaaaaaacgtctgg

SEQ ID NO: 1127 - DNA, 594 bp, Mus musculus
ggcagcccttccacatgatccttttcttgaaccgggaatatgagtcctctgatcgcattgcccttgagctcctcattggaagcaatccggaggtgggcaagggcacccacgtgatcatcccagtgggtaagggaggcagtggtggctggaaggcccaagtgactaagaacaacggacacaacctaaacctacgcgtccacacctcccccaatgccatcattggcaagtttcagttcactgtccgcacccgctctgaagctggagagttccagttgccctttgacccccgcaatgagatctacatcctcttcaatccctggtgcccagaggacatagtgtatgtggaccatgaggactggcggcaagaatatgtgcttaatgagtctggaagaatctactatggaacagaagcacagattggcgaacgaacctggaactatggtcagtttgaccatggggtgctggatgcctgcctgtacatcctggatcggagggggatgccatatggaggtcgtggggacccagtcagtgtctctcgggttgtctctgccatggtgaactccctggatgacaatggagttctgattgggaact

SEQ ID NO: 1128 - DNA, 656 bp, Mus musculus
ctcttcctctttctcttccttttcttcagcctcatcatcactgacttccttatctcgttccttctccacaaagagagtaatgggatagccaatgaactgagaatgcttcttcacgatctcctttattctcctttcctccaaatactctgtttggtcctctttcagatgcaagataacctttgttccacgacccattggttcacctgtgtcagtcctcactgtgaaggatcccccagctgaggactcccaggcatactgctcatcgtcgttatgcttcgtgatgacagtcactttctcagcaaccaaataggcagagtaaaaaccaacaccaaactggccaatcatagagatatctgcaccagcctgcaaagcctccatgaaggctttggtgcccgacttggcaatggtgccaaggttattgatcaagtcggccttggtcattccaatcccggtatccacaatggtcagggttcggtcctgtttgctgggaatgagattgatgtgcagctccttccccgagtccagtttactggggtccgtcagctctcgtaacggattttatccagagcgtccgatgaattggagatgagctccctcagaaagatctctttgttcgagtagaaggtattgatgatcaaggacattaactgggcaat

SEQ ID NO: 1129 - DNA, 565 bp, Mus musculus
cggagcgtcacgtctcgtgcgtgttcattcagccacgatgcctgaggaaacccagacccaagaccaaccaatggaggaggaggaggtcgagacctttgcctttcaggcagaaattgcccagttaatgtccttgatcatcaataccttctactcgaacaaagagatctttctgagggagctcatctccaattcatcggacgctctggataaaatccgttacgagagcctgacggaccccagtaaactggactcggggaaggagctgcacatcaatctcattcccagcaaacaggaccgaaccctgaccattgtggataccgggattggaatgaccaaggccgacttgatcaataaccttggcaccattgccaagtcgggcaccaaagccttcatggaggctttgcaggctggtgcagatatctctatgattggccagtttggtgttggtttttactctgcctatttggttgctgagaaagtgactgtcatcacgaagcataacgacgatgagcagtatgcctgggagtcctcagctgggggatccttcacagtgaggactgacaca

SEQ ID NO: 1130 - DNA, 604 bp, Mus musculus
ggttcctggtgtttaatggagacaggctgggtaagttgacgacggttcaggtggctttgaggggcaatcaaggccatctctccagaggcatcgtggggatgccagattggggaatcctccatgacctggcagacaggcaccaggaagctttaagcccagcaactggagcactgctgacccctggtggccacttcagcccactgggaacttctcatcggcctggacctggctcagtttccccgtgggtgtcagacagtaggtaccacctactccagggccttcactagggcttcattggcctcaatacggatctggatctcagcccgtgctgcctcgtccgccgcacctgacagttctgactgcgccttctccaggttggcccgggctgcccccaggtccagcatgtccagtgtcacagcttcttcagctagtaactgcacagaggagtcggcattcacagtgacggagccgctgctcacaaagtacttagtcgtggtgccgtcttctgtgtgaaccactaccagcccaggccgtagacctgtagtgtggggacatgggatgccaagatgccaaaggctccagtcagcgtaggcacgtccacttg

SEQ ID NO: 1131 - DNA, 551 bp, Mus musculus
gcgtacatacgccgaggccgccgctgcacctgcccccgccgccgggcccggacagatgtccttcacctttgcctccccgacgcaggtgttctttgacagtgccaacgtcaagcaagtggacgtgcctacgctgactggagcctttggcatcttggcatcccatgtccccacactacaggtcctacggcctgggctggtagtggttcacacagaagacggcaccacgactaagtactttgtgagcagcggctccgtcactgtgaatgccgactcctctgtgcagttactagctgaagaagctgtgacactggacatgctggacctgggggcagcccgggccaacctggagaaggcgcagtcagaactgtcaggtgcggcggacgaggcagcacgggctgagatccagatccgtattgaggccaatgaagccctagtgaaggccctggagtaggtggtacctactgtctgacacccacggggaaactgagccaggtccaggccgatgagaagttcccagtgggctgaagtggccaccaggggtcagcagtgct

SEQ ID NO: 1132 - DNA, 504 bp, Mus musculus
cctttttttgttttttttcaaggtttaaatagactttattgttacaaagggggaccccaccaagcagagccaatacatgtggtcccagttgtcaccatggagacatcgagaggtcatgattgcagaagaggtgactggaattgaataacatgatcccggggaaggccagccaggaatgcaggcaacatgatcaaggtgggctggcaaaagtggtctagtcaaaggatgagggaagactgctcccttcactcccgcttcttgtagctctccaggtgtgacaggacccagcccgcaggcagaagacaacacacgaagcaggaagtgagcccaatggtgatatccaggaccccgagctgctcccgcgccggcttcgagtggacctgagcccgcggcaccatgagccgccgggccgatccggtcaggctcctcagcagcagtggcgtcaggacagacatgacggcgcggaacgaccacggacgaggaccagtccaaggggatagtcga

SEQ ID NO: 1133 - DNA, 500 bp, Mus musculus
cttggactggtcctcgtccgtggtcgttccgcgccgtcatgtctgtcctgacgccactgctgctgaggagcctgaccggctcggcccggcggctcatggtgccgcgggctcaggtccactcgaagccggcgcgggagcagctcggggtcctggatatcaccattgggctcacttcctgcttcgtgtgttgtcttctgcctgcgggctgggtcctgtcacacctggagagctacaagaagcgggagtgaagggagcagtcttccctcatcctttgactagaccacttttgccagcccaccttgatcatgttgcctgcattcctggctggccttccccgggatcatgttattcaattccagtcacctcttctgcaatcatgacctctcgatgtctccatggtgacaactgggaccacatgtattggctctgcttggtggggtccccctttgtaacaataaagtctatttaaaccttgaaaaaaaaaaaaaaagggcggccgc

SEQ ID NO: 1134 - DNA, 751 bp, Mus musculus
cttaactaaaataaatttaattgcaaatcaacctgtcttgtaatagaatttacatagtacgtgacgttttaaatacatgtaattaacagcacagatatagtcattacagtgcccaaatctgagtattatatagctttaatatattaaatccccccaaaatcaagataactgccttgaaacttacaaaaacacttcattgtatcaaatgcaaggttcaaacatactaagagcaaaacatctgttcatatgccaagggccaaggctaggcaatgaattaaccctttaacaaaggaataggagccattaaattttcttgagtttgagaggcccaagaccttatagagagagcatctagagttagcagtgatgaaattcagcaagtctggaaagaaatcaaaaagttcaccattacaccacagtacacaggtcagcaccagggtacggatctgaatgagaaagctgccttttgtaaaacatatccctgccactaactagaccaggtacctggaagatgtctgtgaaaatctctttagcacggcagctttaagcagaacctacaacatacagcagtgtactaactgcagaaatgtccactagaagcagtcgtctctggcagcacgatcctgtgaaatggcatagcaataagacatataccccggacagtgaagtaacttctacctcgcaacaggagggtggttatcttactgtgacgcattagaggcagcagctgcagcttcgagcacgcattgtc

SEQ ID NO: 1135 - DNA, 578 bp, Mus musculus
gaagagccgaagaaccgagccctcggacgccggcggttgagcatcgatcgcggtgcgctcgcgcgagataatggcagacccttggcaggagtgcatggactatgcagtaatcctcgcgaggcaagctggagagatgattcgtgaagctttaaaaaatgagatggatgtcatgattaaaagttctccagccgacttggtaacagttactgaccaaaaagttgaaaaaatgctcatgtcttctataaaggaaaagtatccatgtcacagcttcattggtgaagagtctgtggcagctggggagaagacggtcttcacagagcagcccacgtgggtcattgaccccattgatggaacgactaacttcgtgcatcggtttccctttgtagctgtttcaattggcttccttgtgaataaagagatggagtttggaattgtgtacagctgtgtggaagataagatgtacaccggcaggaaagggaaaggtgccttttgtaacggtcagaagcttcaggtgtcccagcaggaagacattaccaagtcactcttggtgaccgagttgggctcgtccagaaagcccg

SEQ ID NO: 1136 - DNA, 442 bp, Mus musculus
gccggtcccaaaacctttatccaattgaaaaccccattgagacaaataaaaaaaatagaagactgccactttggcttttgcaattgggaaatttttttcccccacggcagcctccaaaaactttaacagagtccagggccccaaaaacccccccaccccccattttcccaagggggggaaatggctgccaaaggaaacttcccaccgaaaacaagagttcccggaaacaggaattgtttggggcaattaaaaaaggccccaattggggcacccgggggggagggccaaaaggtttcctggggaggcaaaccaaagtccccagcaggaaaaaccctaggggcctggggaacaaagacttcccagattttaggaagacaacctagggccaaatacggaagagcccagccccagttaaaaccaccgaaagtacagaaagggcccg

SEQ ID NO: 1137 - DNA, 574 bp, Mus musculus
cgccagcttcttttccgcgcccgcgctccgggccctggagaccatgaggttccgcatctacaaacggaaggtgctaatcctgacgctcgtggtggccgcctgcggcttcgtcctctggagtagcaatgggcgtaatggaagagcgacgcccttggcccgccgctgctggacgcggagcccgtacggggtgcgggccaccttgctgtgtccgtaggcatccgcagggtctcaaacgaatcggccgctcctctggttcccgcggtcccgcggccggaggtggacaacctaacgctgcggtaccggtccctggtgtaccagttgaacttcgatcagatgctgaggaacgtcggtaatgacggcacctggagccccggggagctggtgctggtggtccaggtgcataacaggccggaatacctcaggttgctgatagactcgcttcgcaaagcccagggtattcaggaagtcctagtcatctttagccatgacttctggtccgcagagatcaacagtctgatctccagggtggatttctgcccggttctgcaagtgttctttccgttcagcattcagc

SEQ ID NO: 1138 - DNA, 553 bp, Mus musculus
ggtaaagatttctttattattatatataagtacactgtagctgtcttcagacataccagaagaaggcgtcagatctcattatgggtggttgtgagccaccatgtggttgctgggatttgaactcaggacctttggaagaacagtcagtgctcttacctgctgagccgtcttgccagccctagaattttcttatatatcataactttatttataaaaaagactgtaattacattaaagctagagacctatggatggtctggacctaaaaatgcctccagacttcatcaaggaattgacccactgatgaattcacaactgagcaggctaactacatgtgggacctccttggaagaggtcttggggggcatgcctttgaaggatgtgccttgtccctatgtcctctcttctctccacacttcctggcctgtgaggtgagccacctcctccatcataggactctgccatggttcatctcacctcagatccagagcctcatgaaccaaaacctcacaaaccactcactgacataaatcctcttgcctctgtttatgcc

SEQ ID NO: 1139 - DNA, 577 bp, Mus musculus
tttccggctgttgtgtctgtcactttctgcaatgatggaaaacctggcataaacagaggcaagaggatttatgtcagtgagtggtttgtgaggttttggttcatgaggctctggatctgaggtgagatgatccttgtcagagtcctatgatggaggaggtggctcacctcacaggccaggaagtgtggagagaagagaggacatagggacaaggcacatccttcaaaggcatgccccccaagacctcttccaaggaggtcccacatgtagttagcctgctcagttgtgaattcatcagtgggtcaattccttgatgaagtctggaggcatttttaggtccagaccatccataggtctctagctttaatgtaattacagtcttttttataaataaagttatgatatataagaaaattctagggctggcaagacggctcagcaggtaagagcactgactgttcttccaaaggtcctgagttcaaatcccagcaaccacatggtggctcacaaccacccataatgagatctgacgccttcttctggtatgtctgaagacagctacagtgtacttatatat

SEQ ID NO: 1140 - DNA, 527 bp, Mus musculus
gcatgtgttagtgtgtgtgggcatatgtcccattaaggtcagaggacaacctgtaggtgtgagctctcaccttctgccatgggactttaggactcaggtcaccaagtgtctggcaggcacctttaattctggctgtgtttttcagagacaagctctcactatgtagctgtggctgtcctacaactggccatgtagaccagggtttcctccaatttatgtcagtcctcctgcaggctgggctaacaggagagtgccctgcaggctgggctaacaggagtgtgcccctaagcttggctaagaaccaaggctttaagtaccaaggctccctcttctcactacacaatactaagtctgtgaagaatgtacagtcgggagtctaaaatgagtccatagaaaacggaacattttagaaaatctgagcttaaacatagacatattccttctagttaaccttggaaataagtcattaaaatgtttaaaataaaattatcccatccagtgcttttctgctctgtgatagccagtat

SEQ ID NO: 1141 - DNA, 593 bp, Mus musculus
tttaaacccaatcaagcaagatgtgaaaaaggggaagctccgctatgtggcgaatctgttcccttataaagggtatatttggaactacggcgccatccctcaggtacgtgtccaagagcctccttactcgctatatttgtacttttttttcttttagcttagtaaaaattaactcacttttgatcaaacgtttaaatgcagaaaatactggctatcacagagcagaaaagcactggatgggataattttattttaaacattttaatgacttatttccaaggttaactagaaggaatatgtctatgtttaagctcagattttctaaaatgttccgttttctatggactcattttagactcccgactgtacattcttcacagacttagtattgtgtagtgagaagagggagccttggtacttaaagccttggttcttagccaagcttaggggcacactcctgttagcccagcctgcagggcactctcctgttagcccagcctgcaggaggactgacataaattggaggaaaccctggtctacatggccagttgtaggacagccacagctacatagtgagagcttgtctctgaaaa

SEQ ID NO: 1142 - DNA, 538 bp, Mus musculus
aactgttcgtaagtaatttatttttaaattataagatttacaatgccttgattatgcaaaatatcataatagaaattaaactaaatcaataaaccaaaagagaaagaaaactttttccttaaatatcagtacttaagccatctttgtcccaactgcatcttataaagtatgctaatttcaaatgtttcacttgcaggtttaatttctcattttcagcattttatggaactgtaatttttttcaaatgctattatagctagcgtttatactgcaacagcagcagaatctcacgagtgcgatcaaatgtggaggtggggcccagccttcggctttagccacagacagaaatcatccacagcaatcaatagagcaaggtactctcgagtggccagagcgtggcttagagctggtggcagctgctgtcctgtcgctctgatctgaaccagcagcacgtggcagcgttactgctgtggatagtaggactgctgcgggggctgagggaaggggtaggtaggctgctggggtcctgggtatggag

SEQ ID NO: 1143 - DNA, 585 bp, Mus musculus
gttatctgccttaagtcgagagcctactgtggacatatctccagatactgttggaactctcagtcttattacgctggctcaagctcaagaagtatttttcttaaaagccacaagagataagatgaaagatgctttttagctaagctggcaaatcaggctgcggattactttggcgatgctttcaagcagtgtcagtacaaggacacgctccccaaggaggtattccccaccctggctgcaaagcagtgcatcatgcaggccaatgctgagtaccaccagtccatcctggccaagcagcagaagaagtttggggaagagatcgcaaggttgcagcacgcagcagaactgatcaagaacgtggcctctcgctatgatgagtatgtcaatgtgaaggatttttctgacaaaatcaaccgtgcccttactgcagcaaagaaggataatggttttatttatcatgaccgtgttccggaccttaaggatctggatcctatcggcaaagccacacttgtgaagcccaccataccctacctatccaggatatcccgggtattgccaaatgcccatgcccatgggctacaaccc

SEQ ID NO: 1144 - DNA, 289 bp, Mus musculus
ctttttctttttccagaccaaagcatttatttccatagccatatagcagctataacatgacataattatgcagaaaaatctgataaataaataaggtcaccctgcaaagcatgccgggccgaccaggcctcgccctcccttcctaaagctgggagtcaaactgaccatgcaacacttggcactctttaaggccatgagtttctgatgctttaagggggtagcatgaaggaaaccattcaaatcagctcttgcaggctaaggtcttaaagcccacagcctttcaccttga

SEQ ID NO: 1145 - DNA, 249 bp, Mus musculus
cggggcggtgaccgtgtgggaggtggtctcactcttggggaaactgctagggaccgtcgccgcgctgaaggtggttctgtacctgctccgggtgtgcttcgcgatggcctggaaatccggcggcgccagccactctttttgctaatccacaacctccgcaagaatggaatcatcaagacagataaagtattcgaagggatgctggctacagaccgttcccactatgcaaaatctaacccttacatggat

SEQ ID NO: 1146 - DNA, 542 bp, Mus musculus
aaaaggttttacttttatttaaaataaaatgcatttatacagtctttaattcatggattattggacaatactggtaagtccacccctccctggcgcccttctgggctcgtgagctaggaattgtctaactagcaccaacgcagatgtaatagcgcaacagactagaacacagccggtccaggctgtagttaagggcatcacggcaagtcacgagcatcatgaagtcattcgtaatttagcagatactgaaactgcaaattaattatatattttaaaagcacttaattaatgtaaggatgctacatttaagccatttcctagttgtgaatagttttttttaaaaaaaactgtacaattttataaaatttgtgtttgtacattagttacacaaaatgaatacttcatagatctttacttcatattgtaacacaaaggctgcatatcttaggcagatagtgagtatgctggtgaatactaagagtactgtaatacagtttggtgtaaaactaaacacaaaacaatgtacagcatgcttactcaaa

SEQ ID NO: 1147 - DNA, 403 bp, Mus musculus
ctgaacctcagaggatgtgaagttactccggatgtaaacatttcaggccagaaatttaacataaaactcctaattccggtagcagagggcatgaatgagatctggcttcgctgtgataacgagaagcagtacgctctctggatggcagcttgcaggttagcctccaaaggcaagaccatggcagacagttcttacaacctggaagttcagaacattctttccttcctgaaaatgcagcatctgaacccagacccccagctgatccctgaccagatcacaaccgacgtcaaccccgagtgtctggtgtacccgcggtacctgaagaagtataggagcaaacagataacagcacggatcttggaggcccatcaaaatgtaggccagatgagcctgattgaagcca

SEQ ID NO: 1148 - DNA, 12 bp, Mus musculus
tgtgtgtgtgtg

SEQ ID NO: 1149 - DNA, 125 bp, Mus musculus
ggatcttcggccggctcgtccgtgcgtctcatggccgctagtagatccctggtgcctgatcggctgcgcctgccgctctgcttcttgggtgtctttgtctgctatttctactatgggatcctgca

SEQ ID NO: 1150 - DNA, 65 bp, Mus musculus
cacaagtttaatgtggacacagaaaaaacaagcaatgtttattgtgcaattccaatagatattag

SEQ ID NO: 1151 - DNA, 26 bp, Mus musculus
gaagacagaaaccagacaaaggcagg

SEQ ID NO: 1152 - DNA, 319 bp, Mus musculus
gcacacttgggatttttctttaattttttttagcacacaatgtacatacttcccttcccctttaagttagtgtgacaatcttccataataaactacttaaagagaagctttggtcaaaaatggaatgagatagcaaaatcaaaacaaaacaaaatgaaagaaaaatcaaaacgaaccactgccgtctctaaatgccacacgtcacccacgacatccacaggaacacacgctagttgcttcagtgtgacagtgtttccctgggccagcgatcctcaccagcacgtgaacagcagaggcgctcagtcctgttcctcatgct

SEQ ID NO: 1153 - DNA, 257 bp, Mus musculus
gagtccgcgaatcgtccgctccggacctccagacctccccaacctcagctttctgacctgtgaaaacacttaagaatcatgtctctgcatcagtttctgctggagccaatcacctgccatgcctggaacagggatcgacccagatcgccctgagccccaataaccatgaggtgcacatctataagaagaatgggagtcagtggacgaaagcgcacgagctgaaggaacataatgggcatatcacaggtattgactgg

SEQ ID NO: 1154 - DNA, 449 bp, Mus musculus
  misc_feature (1)..(449): n is a, c, g or t
ctgaactgaatcagaagggctacaatgtcaagtctgatgtctggagcctcggcatcaccatgatcgagatggccattctgcgattcccttatgagtcttggggcacaccgttccagcagctgaagcaggtggnggtgngtccatccccacagctcccagcggaccagttctcccctgagtttgtggacttcactaggcagggcctaaggaagaaccctgcagagcgcatgagctacctggagctgatggaacacccattcttcaccttgcacaaaactaagaagacagacattgctgcctttgtgaaggagatcctgggagaggattcatagggactggcccaggaccccactggtctgccagcatccatacatccgtgctggggcagcacttacctacagccataagctactgccattctgttcctgggcatttgagaaattaagggg

SEQ ID NO: 1155 - DNA, 248 bp, Mus musculus
cagcctcacacgattttttttttttttttttaattaaaacagcaataggttcctgcccaggaaaaggctggaagaggcaggcctttcttcacaaaaatagattttcttctttttttttaaaaacaccaccaaagtaaacctattagcttccaagagctggtcacacctggagagttgttacagctccctcggggctttgagccaagagcttgagccatccttgcagactccagtccgagcactgggcg

SEQ ID NO: 1156 - DNA, 539 bp, Mus musculus
gaaaggctggtccagcggctgagcctggcgctgtcctgagaaggagcgctcggtgtggaagagatgaaccggacaaaaggtgatgaggaggaatattggaacagctccaagttcaaggctttcactttcgtcgatgaagatgatgagctctcacagttaaaggaatccaaacgcgcagtgaatagccttcgagacatcgtggatgacgacgatgacgatgacctggagagagtcagctggactggagaacctgtgggaagtatctcatggtccatcaaagagactgctgggagtagcgggtcaacccctgagggacgtgaacagctaaagggccgaaacagcttctacacacagctacccaaacctccttctacttactccctcagcagcttcttcagaggtagaactagacctgggagtttccagtccctttctgatgctctgtcagacacacctgccaaaagttatgctccagagctggggaggcctaagggagaatacagggattacagcaatgactggagcctcagtgatacagt

SEQ ID NO: 1157 - DNA, 181 bp, Mus musculus
cacaaggaatgcaacagttttattaggagtgtaggcatgtcagggaaatcctgttcagggaggcacagggcagaatggaacactgctcaagtccccagcaggctaacagggcctctacggagatatctaaacaaggggctacttggggctgcttctggggaaatgatttttgcctgaaaga

SEQ ID NO: 1158 - DNA, 556 bp, Mus musculus
gcagctgcctggcatttgtgtggtctcgtcgtcagcgcagctgggcctacacacaagcaaccatgtctaagggacctgcagttggcattgatctcggcaccacctactcctgtgtgggtgtcttccttttttgaaaggtggaaattattgccaatgaccagggtaaccgcaccacgccaagctatgttgctttcacggacacagagagattaattggggatgcggccaagaatcaggttgcaatgaaccccaccaacacagtttttgatgccaaacgtctgatcgggcgtaggtttgatgatgctgttgttcagtctgatatgaagcactggcccttcatggtggtgaatgatgcaggcaggcccagggtccaagtggaatacaaaggggagacaaaaagtttctacccagaggaagtgtcctccatggttctgacaaagatgaaggaaattgcagaagcgtacctcggaaagaccgttaccaacgctgtggtcacagtgcccgcttacttcaatgactctcagcgacaggcaacaaaagatgctggaactattgc

SEQ ID NO: 1159 - DNA, 238 bp, Mus musculus
gggggccaattaaaaaaggtttatctttccatgttacttgtttggggccccgggggaaaaaagctaccccttttgggacggacttaaaccaccttttaaaggggggggcctgaaaaacccccccagaggggggggcccccccacctgggaagcccccaggcattcccccaggcatgccccctgccctttggaacaggttggaaaggaaaggggggcaaactttttccagttttttttg

SEQ ID NO: 1160 - DNA, 634 bp, Mus musculus
gttgaatcagtgaaaaggtttattgcttcagtcatgacttcctttcaaaagatgataaaatttctcttccagtagaaaaaaggggtcggttgcaggatgctgggcctccgaataccctctggtgaggtacgctagatgccggggggcgggggggtgtagacggcccatacctctagctttgaccccatgcctgaaaaataaggaccctgaggggcctgccacctctgccacgtacagtggttaattcagtgacatagcagagacgatagaaaaagcgccagatacagctccagagtgtgtgtgcaaactggtcaggacctggagctgcttgcctggccttggcacaagaggccgacatatgcccagcccctaggagtgacagatccgtcctctgtgggaactaaggctttcagactgatggagaaagacagaaagacttcctgagggaagtcaggagcctgggcagggccagcccctacaggaggggctgacagcagctagagttcccacagcctggctcacaggccatttagaagagcacacctgtggcccatcaggctcacttggcagcaggtctgtccctggtccctgagttgtttttgcacatgcgtgggcatccatgtgccgtgcgtgc

SEQ ID NO: 1161 - DNA, 535 bp, Mus musculus
  misc_feature (1)..(535): n is a, c, g, or t
cggtcactgggatccccatgaactgttctgtgaagatgcagctgagcctctacatcaaatctgtcaagggcatcgggcaaacagggaagatcgagccagtagttctgccgttgctgtggatcgatcagctgcggacaatgggtggcaagcccctgagcacgttctacacgcagctggtgctgatgccccaggttcttcactacgcgcagtatgtgctgctggggcttggaggcctcctgttgctggtgcccatcatctgccaactgcgcagccagggtcctgaagacactataagccccccaaacctgatagcttggtcagaccagccacccagtccctacaccccgcttcttgaggactctctcagcggacagcccaccagtgccatggcctgagcccccagatgtcacacctgtccgcacgcacggcacatggatgcccacgcntgtgcaaaaacaactcagggaccagggacagacctgctgccaagtgagcctgatgggccacaggtgtgctcttctaaatggcctgtgag

SEQ ID NO: 1162 - DNA, 135 bp, Mus musculus
  misc_feature (1)..(135): n is c, g, t, or a
gtactaaacagtgttagctttatttcagcctatgatgtgtttaaactgctcacatagatcaccaagtgcccatagctgtgtagcgcttggcattgnccacgcncgtcttccactgcagnaggcaggaaacttcgc

SEQ ID NO: 1163 - DNA, 241 bp, Mus musculus
gactatcccgtcccccgggccttgtggagcgtgtggtccgctggcctgtttgctactagggcaggttggtgattctccagggcagccatgacagagccacagccggcgtccagtggcctcactgatgagaccgcttccctcggttgctccgatccagaccctagcaccaaggattttctactgcagcatacgatgctttgaattaaggatcctaagaagtccctggatttttatacgaggg

SEQ ID NO: 1164 - DNA, 475 bp, Mus musculus
ggcggggtcctcatggaggggtttattgattccatctcacaaggcggtgtgggtgagcggccacagcacatgaaatccaagcccccgacagacgcctgccttgggcacatgcaaacagcgcaacatggtcaagcgcaaacacaggcgaccgaggcaacactggacatggaacacgggatgggggacgggctggggtgatgggtccctaaagagaggctgattcctccccacccccaggggcaggacaggaaaaataagattcgtactttttgtaaaatgcccatttgctgggtactttctttctccttatggtgaaaaataataaaaaataaacacacggaaaaaaatctcaaaaaaggaaaggaataaaactctaagaaggcgaatggtggggccttgaggaggccagctgcacggcactcctcctgttccttggcctcctctcctcagccccttcagtgggcaccccaagccc

SEQ ID NO: 1165 - DNA, 351 bp, Mus musculus
  misc_feature (1)..(351): n is a, c, g, or t
ggagtttggtggactatcttcgatcacgtggtcgttcggtgctaggtggagactgtctcctcaaattctcattatacgtctgtgaagccatggagtacctggagggtaacaattaaaaaaacacaaaaccctgccngccggnntgtgctggtgtctgaagacatcgtggccaatgtcagtgactttggcctcactatggaagcctccagcactcaggacacaggcaagctgccagtctaatggccngcgcctgaagccttgngagagaagaaattttcaaccaagtctgatgtgtggagttncggaatccttctctgggaaatatattccttcgggcgagtgccttaccca

SEQ ID NO: 1166 - DNA, 641 bp, Mus musculus
atgcagagacatttatgattaaccagacaacacgaccaaccacagagggcgcagggcagggagtgggcaggcactcacagcgagtctgccctatcttttggcaataaataaagcttgggaaacttgaagctgccacctgggctgttctgtccgttgtgtccaaagcccaaggctctcggggaggaatgagacggggagcctgtgcacatgcagagagcaggcgcggtcggttattgctcagagaggaaaggtagagcgcataccatggacagggtaaatcaactcagaatatggggcggcgagctcctctctgatcctcagtgccccacagtcacttcacctccagtaggttcgctcacacagtggcaggcagtgttactgcctgccagtgctcacgagtggagggtcagctgatcctggagggaggctgcacatgcacctcagaacctgctccaccagcatctgtggccagaggctgggtgctggggtcaaccatatatggaccggagagtccagtctcgtcatcctccctgcagttgagcctgggtcctggagcctcttgcttccggaggccactgcgctaagtgcccaggggacactatatgtgcacacttgggatttgggggccgtgtacccatgca

SEQ ID NO: 1167 - DNA, 543 bp, Mus musculus
caagctagcagccagcctcgacgagagactcttctctccccgtcttgctgagccagttgcctcatcccaggtgctgattgtcgctgctgctgcccctacatcccctgaccacagcccggcctaagctcttttccggacctgcctctctgctgcttctccggcagcacatggggctgctgtgggaatggtggcaacagcgggagcaacctgaggtggccgtgcatgggtacacggcccccaaatcccaagtgtgcacatatagtgtcccctgggcacttagcgcagtggcctccggaagcaagaggctccaggacccaggctcaactgcagggaggatgacgagactggactctccggtccatatatggttgaccccagcacccagcctctggccacagatgctggtggagcaggttctgaggtgcatgtgcagcctccctccaggatcagctgaccctccactcgtgagcactggcaggcagtaacactgcctgccactgtgtgagcgaacctactggaggtgaagtgactgtggggcactga

SEQ ID NO: 1168 - DNA, 630 bp, Mus musculus
aacttccatttaatttaacatttattttcatttataacgagatgtcacattttctacattaaaatataatcatgctgacccccccactaccccctcagagaaaaacaactggaaggtggaatgcacagagtggggagtcatggctgcacctgagaacacacagcgcagagacccaaacagcagacatggtagaggcacacagaatacagccaagagctcaagccaggaagggacaggaatgaaagaaacattgctacatgtgccacaagatcacccagaaaaggtagagcggactcagaaagcctggggattgaacagagtttaaagcaagtcgtctcacggcccacctcaggatctggagggcaacgcagaaaccgaaaccaccagaaacgcgtcaagaggagggtgggatgtagggtttttcttaattgtacccaagccttttccaagtctcaattctcctgtgactgtagcccagtgggggtcgtcagcacaaggcgtgccaccactgcaggagaacgcaggctgtgcaatgttacctgattctctgtgggcctcagagaaagtcgccacgcaggaattcccaactcacagcactggcagaacgaaactcttttcgtaagaaaacac

SEQ ID NO: 1169 - DNA, 591 bp, Mus musculus
gaggagacaagatggcgttgcgagcgatgcggggaatcgtgaacggggccgcacccgaactgcccgtgcccaccggtgggccgatggccggagctcgggagcaggcgctggcggtgagccggaactacctatcccagcctcgtctcacctacaagactgtctctggggtgaatggtccactagtgatcctagatcatgtgaagtttcccagatacgctgagattgtccacttgacattaccagatggcacaaagagaagtgggcaagtcctagaagttagtggctccaaagcagtggttcaggtatttgaagggacatctggtatagacgccaagaaaacatcctgtgagtttactggagatattctccgaacaccagtgtctgaggatatgcttggtcgagtattcaacggatcaggaaaacccattgaccgaggccctgtggtgctggctgaagacttccttgacatcatgggtcagccaatcaaccctcagtgtcggatctatccagaagagatgattcagacgggcatttccgccatcgatggcatgaacagtattgctaggggacagaaaatccccatcttttctg

SEQ ID NO: 1170 - DNA, 732 bp, Mus musculus
gctttgtcattttttaaaaaaatagcacaatggcacatttttcacgctagagactggctgagacccgactctcgggaaggaacacggatgtcgagtttcagtcatggctctaaggcagacgttacagcttttcacagggatggagacggacacctcagctggctgtgtgtcggggcgagtgggtgtggtcctcacagcactgtggcctgcacgacgatctcggggtcctcgatgtcccttttgctctggaccatcctcagctccagctgacggtggctgggcttctgtccttctcctgcttcagcttttgcacaccggatggtcctctgtaggacgtgctgcatggcagacacggttttctcacaggccaccttgagattgtccgggtgcttgtgtgtccacgccagaagcatggcagcgaagaggtccccggtgcccacgaagacagcttccactttgcgcatctccatccggatgcgctgggtcaccgtggagccgtcaggtttccgcatcctctggctacccagcgcgatcaggtagtcgctgccctgtgaggagggcaggtcagagctggtgatgaccacagtgtcgggacccatacagtgcagcatgtccatcacctcgaaggcttcttcttggctgtggatttttctgccactcagcaactcagcctcaaactggttgggagtgatgatgtcagccacgggtaacactttgtccctgtacacgggg

SEQ ID NO: 1171 - DNA, 598 bp, Mus musculus
gggagagtgtggcagctgccctcagccctctaggcattgaggttgacattgatgtggaacatggagggaagagaagccgcctgacgcccactaccccagaaagttccagcacaggcactgaagacaagagtaacactcagccaagcagctgctcttcggaagtcagcaaacctgacggggctggggagggccctgctcagtctctgacagagcaaatgaaaaagatagccttggagtcggtgggacagccagaggaacagatggagtcgggaaactgctcaggaggagacgatgactggacacatttgtcttcaaaagaagtggacccatctacagaggctgatccccggctgattgagtccctctcccagatgctgtccatgggtttctcggatgaaggcggctggctcaccaggctcctacagaccaagaattacgacatcggggctgctctggacacgatccagtattcgaagcaccctccaccattgtgatagtgctgtggccaagccccaccccctttgtcttgtagttgcatcacgtagagcagcagggcttctatagataggcccagtgtcttggcattcttgtagaatct

SEQ ID NO: 1172 - DNA, 728 bp, Mus musculus
cctttttattttttttttttttttttttttttttttttttttaaaatgaatataccatactaacaaatcgagagctgcgatccagactcaaagagacctacgtttgtgaggccactagcattaaacactaaccattatgacgaaaagcactcagaaatgggccatgaggaaggtgaaaaacataataaaaaatcacaaatactccataaaaccaaataaccatagcctagtaactggaaccggcgacccaccgagctataaaccactatagacagaccccggttaagctaatgagaattaatagtaggtctcatcaagacattgaacaaatcacacttacaaagagaaacacagattctgagtcataccaagccaacgtttatctgcacatatctaacacacaagaacaatacgtattggttgccttaaaagggatagccatttggggcaattggatatacagcagtgcacataactaacacatcgcatttcacgagccagatggaaaaaggggaatactcgagaagcaaacctcgccaccagcaatcaggtatagcaatccggacagtcgaggatagtcgacccgggatttcatgaacggtacatgtgatcgtaccagccttcagctacagtgagccacattagaactggactgaagcaccgggatatctggatcgttaaatacatgattatcagcttacaatttagcttatcatactagagcttgg

SEQ ID NO: 1173 - DNA, 348 bp, Mus musculus
attgttaattctaacttttattcttatacaatttgcagaatagttgaaatgattgctctagtttaatgttgataagaactggactataatacaactgaagtgcagggctgagtgagcaagtaaatctcaaaatgaactcacagacatgatttctctatacatttttgtttgtttgtttgaagaaaattataatagtccgcaagcagtcacagatgaaagaacaaataaaataggtggattgaatagttaagatgagaaacgaaaatatctgtttagagttaaaaatggacagagtgttttattttgcagcaagaagagaaccggatggtggatggcagcagatggaca

SEQ ID NO: 1174 - DNA, 592 bp, Mus musculus
aacagtggaactacaaggaaagaagatcaagctacagatatgggacacagcaggccaggagcgatttcacaccatcacaacctcctactacagaggagcaatgggcatcatgctagtgtatgacatcaccaacggtaaaagctttgagaacatcagcaagtggcttagaaacatagatgagcatgccaatgaagatgtggaaagaatgttactagggaacaagtgtgacatggacgacaagagagttgtaccgaaaggcaaaggagaacagattgcaagggagcatggtattaggttttttgagactagtgcaaaagcaaatataaacatcgaaaaggcgttcctcacattagctgaagacatcctccgaaagacccctgtaaaagaacccaacagtgaaaacgtagatatcagcagtggaggaggcgtgacgggctggaagagcaagtgctgctgagtgctctcctgtccatctgctgccatccaccatccggttctcttcttgctgcaaaataaaacactctgtccatttttaactctaaacagatattttcgtttctcatcttaactattcaatccacctattttattt

SEQ ID NO: 1175 - DNA, 378 bp, Mus musculus
aatcaagtcaacggcttttattgtcagttacatgctttatagaaaaagttgtggagaacgagtcagggttgtacaaaaaaggctaggcttctacatggtctatttacacagatgtggggacccctccgccccccttcaggcacagcagctgcacttgtcggaagcctctttgcagatgcagccctgggagcacttcgcacagcccacggggcagcaggagcagcagcttttcttgcaggaagtacatttgcattgtttgcatttgcaggcgccagcgcaggagcaggatccatcggaggcacaggagcagttggggtccatggcgagtggaggcggcggttgaagatcgacgagagatcggtttgaagggatagtcga

SEQ ID NO: 1176 - DNA, 396 bp, Mus musculus
  misc_feature (1)..(396): n is a, c, g, or t
ttcaaaccgatctctcgtcgatcttcaaccgccgcctccactcgccatggaccccaactgctcctgtgcctccgatggatcctgctcctgcgctggcgcctgcaaatgcaaacaatgcaaatgtacttcctgcaagaaaagctgctgctcctgctgccccgtgggctgtgcgaagtgctcccagggctgcatctgcaaagaggcttccgacaagtgcagctgctgtgcctgaaggggggcggaggggtccccacatctgtgtaaatagaccatgtagaagcctagccttttttgtacaaccctgactcgttctccacaactttttctataaagcatgtaactgacaataaaagccgttgacttgattaaaaaaaaaaaaaaaaaagggcggccgcn

SEQ ID NO: 1177 - DNA, 390 bp, Mus musculus
ggtattaactttattctattttctgtataattttaagtacataaaggtttatttccacaggcctcaggtaatgggcagaagtcacaggacaatctttcttcctcttttcccaccaaaaaaaaaaaaaaaaaaaaaaataggaaaggaaaggttgcatattttggtcagtgtgtcctagagggagcactgggattttgcaatgctgtgcaagattctgatgtaagtcgagacctaaacagccgccgtggaggtcatagccctagtcaggttcctgcgcagaggccctaagctgccgattggcaagcagaagggtgagtggaggcaatgacagtcatctggcagggaggaggaacgccagactccttggaatgctgaggtggttttctttaa

SEQ ID NO: 1178 - DNA, 161 bp, Mus musculus
aactaggttggttagaacctaatagactccctggctcctgccccccagcattccaagcagacttgtttcctaaaagcatccttcatctgcattccatcctgggtcagcatcaaccacaacatagcaggcattcccttgcagctgcagtacagtagcagtgt

SEQ ID NO: 1179 - DNA, 750 bp, Mus musculus
ccttttttgtttttttttttacaagtaaaaggcagtcctttattgtcaccgttctgagcacatggccctgcctctacgcttcccaatcacaacacttcatttgatagtcaaatgtgaggtcaccttggagtatgtagccctaactctagccctagcccaggttctctctcaaggctcaggtgaattcctttagagttagcgctctgaaagctgagctacgaatatttgcataatagaggctacaagcccacctggtgaggctgcagatgggacagaaagggagggcaaggcaagatgaaagccctaggcaaagtccaactagcggacttcaagtccagcaaggtgtccatccaggatatcagtagtcacagatggcagaagctgagaacaaaagtgtcagcgaggcctggaccagagggtcatctcggaccagacagaggctggtcctggctgaggtccaatggagactgtgaggtaaagggcagctgtcagggagctcagacatcatagaagagtcggacgagttggtaacgaatggagaaggtggcggcgctgcttaggacctgcaggagcagcaggagcagggtgaggtttctctcatgtataggcccaaagactttaagtagcaagttgatgagggtcatgttgttacactcagtgaaggcaccgtcctcactctcaccttggtgaactgtcactaaccggagttctctgctacctttaaaataaaggtgcccaggaaagagaggt

SEQ ID NO: 1180 - DNA, 587 bp, Mus musculus
ggagggtcaggtcctagcgtcctagctgggttttgttcccgctggcgccggaatcctctgcgggttgggagccgcactgccggctgccgaggccacgggattgttcctggcttaccagttagctgagtaggcggcggggcggcggccaccggagggtcaccatgtgggccttcccggagttgcccctgccgctgccgctgctggtgaatttgatcggctcgctgttgggattcgtggctacagtcaccctcatccctgccttccgtagccactttatcgccgcgcgcctctgtggccaggacctcaacaagctcagccagcagcagatcccagagtcccagggagtgatcagcggtgctgttttccttatcatcctcttctgcttcatccctttccccttcctgaactgcttcgtggaggagcagtgtaaggcattcccccaccatgaatttgtggccctaataggtgccctccttgccatctgctgcatgatcttcctggggtttgctgatgatgtcctcaatctccgctggcgccacaagctgctgctgcccacagctgcctcactacctctcctcatggtctac

SEQ ID NO: 1181 - DNA, 554 bp, Mus musculus
cacagttctaacagcgcatttactttcccccttctgtaaggcccagggagcttggtcaagatcaagtccgacactttttcttcattcttccttcagccacttcaacagctgcggtgcaaagtaggtgatgatgatgtcggcaccggctctgcggaaggccgtcatggtctccagtacagcagtcctgagatcaaaggccccggcctgggctccgtgccacaacatggcaaactctccagacacctggtatactgcgagggggagctcggggtgcttgtccttcacctctcgcaccatgtccaggtagggcaatcccggcttcaccatgagcatgtcagctccttcttgaatgtctcgggccactgctcggagggccaggccacgggcaccaggaggcagctgataacagcgtcggtctccaaaagctgggcttgactgagctgcatcccggaaaggaccgtagaaacaggaggcaaatttggcactatagctcatcacagagaccctgttgccaagtccatgttttagcagggcagccttgatgggatagtcga

SEQ ID NO: 1182 - DNA, 543 bp, Mus musculus
atcaaggctgccctgctaaaacatggacttggcaacagggtctctgtgatgagctatagtgccaaatttgcctcctgtttctacggtcctttccgggatgcagctcagtcaagcccagcttttggagaccgacgctgttatcagctgcctcctggtgcccgtggcctggccctccgagcagtggcccgagacattcaagaaggagctgacatgctcatggtgaagccgggattgccctacctggacatggtgcgagaggtgaaggacaagcaccccgagctccccctcgcagtataccaggtgtctggagagtttgccatgttgtggcacggagcccaggccggggcctttgatctcaggactgctgtactggagaccatgacggccttccgcagagccggtgccgacatcatcatcacctactttgcaccgcagctgttgaagtggctgaaggaagaatgaagaaaaagtgtcggacttgatcttgaccaagctccctgggccttacagaagggggaaagtaaatgcgctgttagaactgtg

SEQ ID NO: 1183 - DNA, 489 bp, Mus musculus
caaagtctatgcaaatctttattttgacatttaaaagattacatacccattccgacagtttccctaggcgtggtgacccaataagttatacacacactctggcacttgtgggctaggacacaggggatctctggtaagtttccgacagtgggaccctcggcagcggaagggtcgctgggggcaggggataaaggttcatgttagtaacaataatggcagagctaagggtgacattacagagcacttgaaactgttctctttggaggtatatgagggataggatagagtcttgctatgaagcccagactgggctcaaatttgcaatcctccggtctcagctttctgaagactggagtgccactacaccaggcactagagatgcgatcagagggctgagggcagactgcaagctccccactgacttccacccttcctgtatggagggtaaactatagtactaaccaatagaggggagtagaggcatccagg

SEQ ID NO: 1184 - DNA, 595 bp, Mus musculus
agtcgcacctgcggcaccccaacatcctcaggctgtatggctatttccatgacgcccccgagtttatctgattctagaatatgcgccccttggaacagtctatagagagctccaaaaactctccaagtttgacgagcagagaacagctacttacatcactgagttggcaaacgctctgtcttactgtcattcaaagagagtgatccacagagacattaagccagagaacttactgcttggctcaaacggagagttgaagattgcagacttcgggtggtcggtgcatgctccatcttccaggagaaccacaatgtgtggcaccctggactacctgcccccagagatgattgaaggccggatgcatgacgagaaggtggacctctggagcctcggcgttctctgctatgagttcctagtggggatgcctcctttcgaggcacacacgtaccaggagacttacagaaggatatctcgggttgaattcactttccctgactttgtgacagagggagccagggacctcatttcaagactgttaaaacacaacgcaagccaaaggctaacactagcggaagtccttgagcacccttggatc

SEQ ID NO: 1185 - DNA, 85 bp, Mus musculus
acagtccactttttcaagtgattttattccgttaccccgtggtaggaaaactcatcaggacaaaattatcagcacaaacacatat

SEQ ID NO: 1186 - DNA, 300 bp, Mus musculus
gcggaggttgtggtgacgccatcatgggagctccggcgctgccccagatctggcagctgtacctcaagaactaccgcatcgccaccttcaagaactggcccttcctggaggactgcgcctgcaccccagagcgaatggcggaggctggcttcatccactgccctaccgagaacgagcctgatttggcccagtgttttttctgctttaaggaattggaaggctgggaacccgatgacaacccgatagaggagcatagaaagcactcccctggctgcgccttcctcactgtcaagaagcaga

SEQ ID NO: 1187 - DNA, 666 bp, Mus musculus
ctacttcttgcttaaaaacatttatttaaagtgaaaaagaatgacattttactctctgcagcctgggctagggggagcatgggaggcctcctaggactctcaggactctctagaccagaagccgccaccagggcagagacccaaacccaaagaacagaagctccggggcactggagtgagaacatgaatttgggaaggagcagttcttcaggaagcctgtgaagcctttctgaggcagggaccacccaggcgaagctctaactgtccttgggcgccaggatctgctggacatagttgacgacgttgctgtggagctgggaagcagtggcggcaaaggtgtccttggccagggtccgggccatctcactgccacccatcatggcgtggtacagaggcagagtgtacttctgctttccctggctctgcaggaagtccttcactttctggaattcctcttggtagtcattcttaaggatgatttggccccatcttagccgtaactcagcattctgagcattggaaatctttgggtatgtctccccaagttttttcacattcccaggagggagaggagacttctgcaagatcttatctaggaagtagacaagctggtaggtcttccaggtagagatggccacggcttcaatggcttgcatgtctggctct

SEQ ID NO: 1188 - DNA, 706 bp, Mus musculus
  misc_feature (1)..(706): n is a, c, g, or t
gcggtcttaaaccgagcctttttcccttgctttgacactccagcaatgaaatgcacgtattcggctcttattgaggttccagatggcttcacagctgtgatgagtgcagacacctgggagaagagaggaccaaataagttcttcttccagatgagccatcccatcccctcctatctgatagctttggccattggagatctggcttcagctgaggttggacccaggagccgggtgtgggcggagccctgcctgattgaagctgccaaggaggaatacagtggggtcatagaagaatttctggcaacaggagagaagcttttcggaccctatgtttggggaaggtatgacttgctctttatgccaccgtcctttccatttggaggaatggaaaatccttgcctgacctttgtcactccgtgcctgctagcaggggaccgctcgttagccgacgttatcatccatgagatctcccacagttggtttgggaacctggtcaccaatgccaactggggggagttctggctcaatgaaggcttcaccatgtatgcccagaggaggatctccaccatcctgtttggagctgcttacacttgcttggaggctgccacagggagggctctgctgcgtcagcacatgaatgtctncggagaggaaaacccactcaacagcttcgggtgaagattgaaccaggtgtggaccccgatga

SEQ ID NO: 1189 - DNA, 750 bp, Mus musculus
gtcagtataaactcctggattgagctggaagaggaccacctagcgcgggtggaggaggccatcacccgcatgctcgtgtgtacactgaagactgcagaggacccgcaccaccccaggacctggctgaaccccactgaggttgaggagacatctcacgaggtcaacagctgctacttgaacagtgctgtttgtgccttttttgatcattgtgaaaaagctaaaacagtagagttgcaagtgctgagcgcaaacggggcggagccacgtgtgcaggaggagcacatggaagtggagcaggcccagggcccgagcctcacatcgagggctgagaaacaggaggccgtgagcctgtttggcccagatctgatccctgtgacaccagcatccgaagagagaggaggcgcactggaaggcgacagcgaagaatctgtcagcagtaatggaggacactttgcagaactgccctgtgccaggagacagcaaaccagcaaaggggcgagcgcattgacggagcccttggccccgaggggtcctatggcgcattctcgagtcttcgtgtccacagatgacttgctggactgcctagttaatgcacaagtaaccaggatggtggcccagctattgatacaaggaaaaagctgtgatactttctagggactgtttaattacttgtttactaacttttgaaattatatgtgtgagaaattaatgtgaaaaaaaaaaaaaaaaggggcggtccgcgttatgaat

SEQ ID NO: 1190 - DNA, 633 bp, Mus musculus
agtaacaaaatcttttataaaaaagaatccttcagaattccccataccccagtgtccttcccagcaaccaggtcatgtgagcatgattcccacagaggccagtgcttcaacggcccaggcaggacagaggctgtggtcaccatacatagtgcgcatgaagtttcgtacaaagtcaggaaagcgctgttccaagatactgctgcgcacggcactcaggagctgcagctgataggcaatgttgtgcacggttaggtggtgtagtgctgtagtgttgtcactgtgtagcagggcatgcaggaaggctcggctgtgcgtctggcaggtgggacagggacactcagggtttatggggctgaaatccttggcacactgcttcttcttcaactgaaggttcccagtgggcacaagggcggatccaaagcgcgctgtccgtgtggggtacacacagtcgaacatgtcacatccaagagccacgcagaccaccaaatcggtggcatagcaacccccatcaggtatcgtggcttgtccttaggcagcgtggaggtgctcaacgccaccatcttccagaactgtgccttgctttctcctccactcagacctccgatggcgaaccgggcacatctctcttggtca

SEQ ID NO: 1191 - DNA, 648 bp, Mus musculus
gcggcggtaggcagcccaggttcgcttgagtccgctccacgaataatgcggctggtcgctgagtgcagtcgctccggagctcgggcgggtgagctgcggctgccgcatggaacggtagccacccctgtgttcatgcctgtgggtacacaggccaccatgaagggtatcaccacggagcagctggactccctgggctgccgcatctgcttgggcaacacctaccatctggggctgaggccgggaccggagctgatccggaaagcccagggtcttcacggcttcatgaattggccccacaatctgctgacggatagcggcggcttccagatggtgtccctcttctccctgtccgaggtgacggaggagggcgtccacttccgctcgccctacgatggagaagagacacttttgagcccagagaggtcggtggagatccagaatgctctgggctcggacatcatcatgcagttagaccatgtggtgagcagcacagtgacaggccctctagtggaggaggccatgcacaggccagtccgctggctggacagatgcatcgcagcccataagcacccggacaagcagaacctctttgccatcatccagggtggactgaatgctgatcttcggaccacttgtctgaaagagatg

SEQ ID NO: 1192 - DNA, 673 bp, Mus musculus
gagagttgcaatcgtgctggttttacctgactcccacactgcacggctaagcctctagctggagtccagcagaaaccaggccagacatttctgggagaaggcctcagcagcctgggcagctactaatgagagctaatccaaagtcttaacggccgtaagaggagacgaacggtcagctactgtctcatcagggagatgatctggccccggggttcagtagaaatgactggcctgtgtgccacagtagaaaaggagctagagtttgaagccagagtgaatggccacaatccctgtagtcaggttctcgtacgtcaccctctgaaagcctgcgtcttcaatcatgtccttgaagtcctcctgatttgggaacttccgaatactttccacaaggtattggtaggacttccagtctcctgcaatgacctcaccaatgacagggatgacctggaagctgtacagatcataaagcctggatatgagagggtcattcacttggccaaattccagacagagaaaccggcctcctggctttaggacccgatgggcttcctggagagcctggtcaatgtgtgtgacattccggatcccaaatgcaatgctgtaaacatcaaagctgtcgtcatcgaagggcagttcttcagcgtctcccagcacccacgccagtccagctgtg

SEQ ID NO: 1193 - DNA, 716 bp, Mus musculus
aaggccttggaccaaggacacacagctggactggcgtgggtgctgggagacgctgaagaactgcccttcgatgacgacagctttgatgtttacaccattgcatttgggatccggaatgtcacacacattgaccaggctctccaggaagcccatcgggtcctaaagccaggaggccggtttctctgtctggaatttggccaagtgaatgaccctctcatatccaggctttatgatctgtacagcttccaggtcatccctgtcattggtgaggtcattgcaggagactggaagtcctaccaataccttgtggaaagtattcggaagttcccaaatcaggaggacttcaaggacatgattgaagacgcaggctttcagagggtgacgtacgagaacctgactacagggattgtggccattcactctggcttcaaactctagctccttttctactgtggcacacaggccagtcatttctactgaaccccggggccagatcatctccctgatgagacagtagctgaccgttcgtctcctcttacggccgttaagactttggattagctctcattagtagctgcccaggctgctgaggccttctcccagaaatgtctggcctggtttctgctggactccagctagaggcttagccgtgcagtgtgggagtcaggtaaaaccagcacgattgcaactctcaaaaaaaaaaaaaggcggccgca

SEQ ID NO: 1194 - DNA, 744 bp, Mus musculus
accacaaatgccattatttattttgatgtttccaaagatcaaaacattttcaaacacaactaagatataaaatacagcataaaaatgaggtttatacctattcccacataaagctaaagcatcttcagaaaacttttgccaaaccaatatgtgtatcattgttttctcccgtcccaggcgcaccccacaggaggctggtaaatgggccaagtacccttgggatgagggttcccatcccaggcagaacccacaggaggctggtcaaagggctaagtaaccctgggacgagggcttctgctgcacggcatgcacttgcctcccagggtctgccccactccacagactggaatgtcatggggctgccactgcaggtggctgtgcactgaggcagctctgtggtaaagaactagcatggcctgagccagtgctggaactcacttgggaggaataggcaggccataaggctgcaggaaaacatgggctaggtgttgagaaggtgaattcagcctgcagagccagcgaggcaagggactgacccaaagtgactcagagaacaaagtcctgcctacccagctgatgccagaaaggaggacctccaagactctgtacccaagggtgaggtaagctaccagcttccctccaggggttctaagtctgtctgttctctccaacagacctgggagagatccaggaggaacccaactaccctcatggcactaccatgcagatgagcagaccacagca

SEQ ID NO: 1195 - DNA, 627 bp, Mus musculus
gataccaccattcccctgaggctgttgcttgctcagatttttgtcaacttgctctgctgtatgcagccaagatactttttacaatttgtgatgccttaccaatttgatctcagtcctgtatttaaagttttctaacattgccttacaccgtgtttctctttttgggggaggggtggggtgtctaatgctgtggtcttgctcatctgcatggtagtgccatgagggtagttgggttcctcctggatctctcccaggtctgttggagagaacagacagacttagaacccctggagggaagctggtagcttacctcacccttgggtacagagtcttggaggtcctcctttctggcatcagctgggtaggcaggactttgttctctgagtcactttgggtcagtcccttgcctcgctggctctgcaggctgaattcaccttctcaacacctagcccatgttttcctgcagccttatggcctgcctattcctcccaagtgagttccagcactggctcaggccatgctagttctttaccacagagctgcctcagtgcacagccacctgcagtggcagccccatgacattccagtctgtggagtggggcagaccctgggaggcaagtgcatgcc

SEQ ID NO: 1196 - DNA, 69 bp, Mus musculus
aattggtaaaattatacttaaaaaaaaaaaaaaaaaaaaaaaaaaaacccaaaaaaaaaaacccccccc

SEQ ID NO: 1197 - DNA, 544 bp, Mus musculus
gaagataaggaggatgaggagaagcctaagattgaagatgtgggatccgatgaggaagatgacagcggcaaagacaagaaaaagaaaacaaagaagatcaaagagaagtacattgaccaggaggagctgaacaagacaaagcctatctggaccagaaacccggatgacatcacgcaggaggagtatggcgaattctataagagcctcaccaatgactgggaggaccacttggcagtcaagcacttctctgtagaaggtcagttggaattcagggcattgctcttcattccccggcgggctcccttcgacctttttgagaacaagaagaagaagaacaacatcaaattgtatgtccgccgtgtgttcatcatggacagctgtgacgagctgatacctgagtacctcaactttatccgcggtgtggttgactccgaggacctgcccctgaacatctcccgggagatgctgcagcagagcaagatcctgaaggtcatccgcaagaacatcgtcaagaagtgcctggagctcttctccgagctggctg

SEQ ID NO: 1198 - DNA, 623 bp, Mus musculus
attacaggaatcatttttatttctttatgaaaataaaagaagctcttgtgtttataagtctttggcaatacaaaaagaatgtgtgtctttaaattcacacatgtttcaatataactttaaaaatatctcccctcacatccactcctacactaggacatgtcatgtttgggccaggcttgccttgaatctgaggtaatccccttagctgtgagcctacaggtaagagaccacggggtttgccaccattcccaagttaaaactaagcatctactttgatttccccactctccccactctgggccaggcccggggttgaacctggatcttagtcctcaccacacacatattttctcctcagttacatgcccaccatactttggctcaagagggtctataatgaatttcatgtctggtaaccggaatttcatgtcatgccgctggaaaggtaagggctgatttttatacagagctatagtgagctcagaaatttcactttgtggagtttagtggggttctcagagaataggaagtacatgaaaatgtatttggtaatatgaatctgttctatgagaactgtcttggagcggcccaccagcctcatgcacacacagtgctggtataga

SEQ ID NO: 1199 - DNA, 605 bp, Mus musculus
ttgttggactgggctgtgtggacccatccagcacactcaggtgataacaagatatggagaagtcaaagggaagaaagtctgtttcccaggccacagtggagaattgcatggagaacccaggcctggaactcatggaaggcggaaatcttgagcaaagatacacacaggaggaagtgacacagggacacagcctggaggatggcttggggcattcctctctctggagcaggaggatttttcagcctttcacgaaggcgagaagtttctttgaaagacatgctggtttattcagaaagatcctgcttggtctcttgtgtttagcttatgctgcctacttcctggcagcgtgcatcctgaacttccagagggcactggccttgtttgtcatcacctgtcttgtgatcttcatcctggcttgccattttctgaaaaaattctttcctaaagaacaactaagatgcttgaagcctctggaaaacacccacctgaatctttgggcaaagcgggtgttcgtaggactctctgttgttggcctcatcctctggctggctctcgacacagctcaaagaccagagcagctgatctcctttgcaggaatctgtatg

SEQ ID NO: 1200 - DNA, 673 bp, Mus musculus
gaggtagagagacatgtttattggacccttgtccctgcttgtgagtccccttcccgcccttggctttatccctccccggagctggcaggccagggcccaagtttatcttggtaaacttggttggttgcagcttcagagtttgctgtgagaaaatggaggaactagatcaccacagggatctgcagcctctgcaccaactttggggaaaggtctctgaggtgctgttttctgtgggttctcagctactgaaccaggctatgaaccggcacctcaaggtacccagaaatccctggagccaggagcaaaagggtgcagtcctctccccattcatgccgctcaccagcttccaagcttcctgcatttgccagggatccaccttgtgggatgtcagcaggaacttcccgtaacagcaccgatccaaggggtagtgggtagcaccagccaatttgacacagtgtgtgggggcaaggcgcctcgccttgcacttactcccacaaagacatcctctagaggtagaggtggggcccggctggccaccttcaggatgagctgcacagcagagatggacagtacatatcctgtgcccgaggcatagggtggaaaaggaccccagttttccggccacagttcttctgacacatggtgccgggactctggtgtccgagtgggtctc

SEQ ID NO: 1201 - DNA, 675 bp, Mus musculus
gctgctgagcctgtccctggcatccctgctgccggccccagcctcgccaggaccgcccctcgccctgccccgcctcttgatttctaactctcatgcctgtggtggctccggaccccctcccttcctgctcatcctggtgtgtacggccccggagcacctgaaccagagaaacgccattcgggcatcttggggtgccatccgcgaagcccggggtttcagagtgcagacgctcttcctcctgggaaaacctagaagacagcagcttgctgacctgtcctcagagtcagcagcacacagggatgtcttgcaggcctccttccaggattcctaccgcaacctcaccctcaagaccctcagtggactgaactgggtgaacaaatactgtcctatggcccgctacatcctcaagacggatgatgacgtgtatgtcaacgtcccagagctggtgtcagagctgatacaaagaggggggccttcggagcaatggcagaagggcaaagaggcccaggaagagacaacagctatccatgaagagcacagaggccaggcagtgccccttctgtatttaggcagggtgcactggagggtgagacccactcggacaccagagtcccggcaccatgtgtcagaagaactgtggccggaaaactggggtccttttccaccctatgcctc

SEQ ID NO: 1202 - DNA, 689 bp, Mus musculus
actggtgaatcatttatttagataagacaaaaacatccccacctggtttctctttatacagaaagtggaacatttcaaatatattagcttttctctttttcaacagaactcatttcggtctggtcccaggaactgcttctcatgttaggattcacgttttagtaacacatatgcacccatcacagccaaaagagcatacttgaattttggatagtcattcattatgatggtgaccatgccaacataaggtaagaaccctcgagctcttcctaccacgtccttcttctccagccagttctggccttctttgtacaagcctctatcatcgacttcattattatctcctttagtcagaaacttgatgtcaccattatctttttcatgaaccttgattactctgtgaactatcggaatgtctcttccttcaaccttaaaaacaactatttcaccagctctgatggggtcctcccggaaattcgtgaggaacagcagatctcctctgtggaaggccggctccatactgccactgagtaccaccacgatgggactctcgctgcccgtgagaacaatcaggcctttccagatcatgagcgcagaagacacgatcatggcaaagtttaaaacctggtagtagagctgtcgtttgttcatcttcctcaggtccccagagatgtccaggctggacgtgg

SEQ ID NO: 1203 - DNA, 787 bp, Mus musculus
  misc_feature (1)..(787): n is a, c, to or g
agacagagccggccggccgcctgggcccccagagaccccgccatggttcgtgcgggcgccgtggggacgcatctccccacgtccagcctggacatctttggggacctgaggaagatgaacaaacgacagctctactaccaggttttaaactttgccatgatcgtgtcttctgcgctcatgatctggaaaggcctgattgttctcacgggcagcgagagtcccatcgtggtggtactcagtggcagtatggagccggccttccacagaggagatctgctgttcctcacgaatttccgggaggaccccatcagagctggtgaaatagttgtttttaaggttgaaggaagagacattccgatagttcacagagtaatcaaggttcatgaaaaagataatggtgacatcaagtttctgactaaaggagataataatgaagtcgatgatagaggcttgtacaaagaaggccagaactggctggagaagaaggacgtggtaggaagagctcgagggttcttaccttatgttggcatggtcaccatcataatgaatgactatccaaaattcaagtatgctcttttggctgtgatgggtgcatatgtgttactaaaacgtgaatcctaacatgagaagcagttcctgggaccagaccgaaatgagttctgttgaaaaagagaaaagctaatatatttgaaatgttncactttctgtataaagagaaaaccaggtgggatggtttttgtcttatctaaataaatgattcaccagntaaaaaaaaaagggcggncgc

SEQ ID NO: 1204 - DNA, 718 bp, Mus musculus
cagtagcagtccctctaacacagactcccaagtagccctcataattgggagggatgagaccctgtggtccttcctgatcaggctgtgtcccagtcgcgtggcgctgtgttgggatggctagtgacagcaggggcggtcccctcagcggaggcggaaacttgacacttcagacttgggagtggctctcgccttgcctggtgcttataaacttcagcctcagggctccagatcggttagctgcatcccaccttctttcccggtcaatctgtgtggacatcagctcctgctttggtatactgatggcagcagagactctgactgaactggaggcggccattgagactgtggtctctactttcttcacctttgcagggcgggaaggacgcaaaggcagtctgaacatcaatgaatttaaggaactggccactcagcaactgcctcatttgctcaaggacgtgggctctctagatgaaaagatgaagaccttggatgtgaatcaggactcagagctgaggttcagtgaatactggagactgattggagagctggtaaaggaagtcaggaaggagaaggccctggggatccggaagatgtaaagcttgctgttcagtaggacctgttgggcagagtcaggcagtacttcacccctgtcccaaataaagctttcttcttgaacacataaaataaaaaaaaaaaaaaggcggtcgcttaaataaat

SEQ ID NO: 1205 - DNA, 431 bp, Mus musculus
acaaagataaggtcatttattcacgttatattactgcatttcaaaggcaaaaatacagatgtctgttctgaatgccaaggtcagagacagccacccacccccagccccaatggtaaacacatttgtacacatgggatatcaacatacaaacacagtatcacaggtctggaaagcccagtgggcagggagaccctgcaggctaaagggtggcacatttcctttgctttcctgtgcctctgatctgtcccaaaggccacactatccaggtcaccaacaaaaatagagaaagaggaaggcacagcatgttgacaccagggtgagaattcccaggtgaagggaacgtccccttctgtcctctagtccccagtggcatctcttgggccaggctaatgcccaagcctaacactgccttgggcgggaggttccccaaa

SEQ ID NO: 1206 - DNA, 614 bp, Mus musculus
gctttttgttttgtttttgtttttgtttttagaagcagttcgtagtatttgaaagaataaatcaagttttgattatgctataggttgatttttgtgttgatccaaatcagaatagctattgggtgtttaagtcatgactttatttttctgggcatgctatataaacttgaatttcctatgtatttttattgtggtattttaaatgtgggggaagggattgggtattttttaggggaaaaaaaataatgtatgctgtagtggtcaaaggagctctgattgagctggcaggccaggttttgtaaagagcaaaattactttcaggtcccttgttgagggaacaggtcagcgttatcctgccagacatctgggtcaggaacttgggagacaacatctgcttacctggcagaactccccactccactcccccaggtgggctgggtggaaggaccctcagccaccaagaactgacgccctcatggccctagactatggggttgaaaactcatagcagtcaggtttgtttaccatctctccgagcctccaccacactccctgacccacccaacgtctccagttcttattgttctccttccttccttctttcctttcccttc

SEQ ID NO: 1207 - DNA, 683 bp, Mus musculus
gacatggcagtgcgggtttaatatacatatatgtagaatatatatgtacacacagttagcacggtcaagatggggaagggcatcttgggacagggaggaggctgggttcactcactgcactctagtgacttgactgtgtggcatccacaaacccaaatgagaaaggttaccagtcccttcctggattgaatcagggtggtggtcagtgcaaaggaaacactgtaattaactacttgcttggagaattctaaactggagagtggaaaggttgcctacaatactctgtaggttgtgggcaggttggggttaaaacctaaggatctcatcccccaatctccctaggctccaggtcagtttatccaacagtctgtatttagaaactgaggagcagaaagtgggcctgtctctgcctgcgtccctagctcaggctcagtagtgcatggtcccggcatcgtctctccagagcagaaggttgggggacagtaaatgctggcttctccattggggtttgatctttgggaccaggaaaggatcgagtggtcttctcattaagatttctggctcatccgcatcccaggcccataacaagggcataaggagggcccattggcactcaggacctcagcctaagggaacagcaggaagctggcttctaaccagtccagcatagagatacaaacact

SEQ ID NO: 1208 - DNA, 589 bp, Mus musculus
  misc_feature (1)..(589): n is a, c, g, or t
tgcaaggaggacatccccagtgagaagagtgaggagatcaccacaggcagtgcctggtttagcttcctggagagccacaacaagctggacaaagacaacctctcctacattgagcacatctttgagatatctcgccgtcctgacctcctcactatggtggttgactacagaacccgtgtgctgaagatctctgaggaggaggagctggacaccaagctaacccgtattcccagtgccaagaagtacaaagacattatccggcagccctctgaagaagaaatcatcaaattggctcccccaccaaagaaggcctgaacaagggggaggaagaggaggaaggttggatcttcatcagaccactcccttccccatcctcaatgggaggggctagggcaaccccctgctccgtacccatttactaacttggtcctaacccttactatgcgcgtgtgtgtgcgtgtgcgcacgctctggctgtctgtctgtctagctcatctagttcctcctcctcatgaggggattggagggcaaggngagggggggncttaaatccccccactatagggggaggtggacgctttttctatgt

SEQ ID NO: 1209 - DNA, 659 bp, Mus musculus
tgaagcaccccgagctctttgaagcactgggcatcgcacagccaaagggagtcctgctctacggacccccaggcactgggaagacattgttggcccgcgctgtggctcatcatacagactgtacctttattcgtgtctctggctctgaactggtacagaaattcatcggggaaggggcaagaatggtgagggagctgtttgtcatggcccgagaacatgctccatccatcatcttcatggacgagattgactctattggctcctcacggctggaggggggctctggaggcgacagtgaggtacagcgcacgatgctggaactgctcaatcagctggatggctttgaggccaccaagaatatcaaggttatcatggctactaataggattgatatcctggactctgccctgcttcgtcctgggagggttgacagaaaaattgaattcccaccccccaacgaggaggcccggctggacattttgaaaatccactctcggaaaatgaacttgaccagggggatcaacctgaggaaaattgctgagttgatgccgggagcttcaggggctgaagtgaagggtgtgtgcacagaagctggcatgtacgccctgcgggaacggcgtgtccacgtcactcaggaggactttgagatggcagtagct

SEQ ID NO: 1210 - DNA, 322 bp, Mus musculus
atcatcacacagatctttattgtattggggggggttcgcacacaaatccaacactctcacttccgttaattcttgtcggagttcgaaatcattccttccttattccacggccttagctagttccatctcaaagtcctcctgagtgacgtggacacgccgttcccgcagcgatacatgccagcttctgtgcacacacccttcacttcatcccctgaagctcccggcatcaactcagcaattttcctcaggttgatacccctggtcaagttcattttccgagagtggattttcaaaatgtccagccgggcctcctcgttggggg

SEQ ID NO: 1211 - DNA, 651 bp, Mus musculus
tgaagcaccccgagctctttgaagcactgggcatcgcacagccaaagggagtcctgctctacggacccccaggcactgggaagacattgttggcccgcgctgtggctcatcatacagactgtacctttattcgtgtctctggctctgaactggtacagaaattcatcggggaaggggcaagaatggtgagggagctgtttgtcatggcccgagaacatgctccatccatcatcttcatggacgagattgactctattggctcctcacggctggaggggggctctggaggcgacagtgaggtacagcgcacgatgctggaactgctcaatcagctggatggctttgaggccaccaagaatatcaaggttatcatggctactaataggattgatatcctggactctgccctgcttcgtcctgggagggttgacagaaaaattgaattcccaccccccaacgaggaggcccggctggacattttgaaaatccactctcggaaaatgaacttgaccagggggatcaacctgaggaaaattgctgagttgatgccgggagcttcaggggctgaagtgaagggtgtgtgcacagaagctggcatgtacgccctgcgggaacggcgtgtccacgtcactcaggaggactttgagatgg

SEQ ID NO: 1212 - DNA, 586 bp, Mus musculus
gccttttcagacactttatttgaacttgacagtggcggttagggatttgcttgagatgctttatggagtatctcacattctgaagaaagctccacagtttcagtccatctccatcctgctgctaacacagctggcttgtttagggagtgtccaatctagccagatcaagggaaccccaagagagccagggcaagtcctgcctctggtgccaagcctcaggtttggaagcctggagaatgctgccagccctggagagcttgggagacctctaggctctctttcccttcttttcaaatcccacaatttcctgacggggagaagctgtaattagctcagaccaggcactcgatctcagctagtacagctgcagggaaaaccccatggaaacttgggaaccagtgtttttccaattacagggaccatggaataaactttttctgtgggttctattgaaaccagatttctcaagtcagctgccaagggaagaaggtagggccagtctgccgctgggcagcatctccttagcccaggcactccgtttcctttcagccaggctgggtgatcccacacagtaggaaggtgagct

SEQ ID NO: 1213 - DNA, 20 bp, Artificial Sequence
  There was no 1213 sequence.  There was a numbering error.  This i s a place holder.
  misc_feature (1)..(20): n is unknown
nnnnnnnnnnnnnnnnnnnn

SEQ ID NO: 1214 - DNA, 550 bp, Mus musculus
agctcagcaaagagtacacactggatgtgtaccgactgtcctctgtggtcacacaacacgacgccaagaaagcgggggctgaggttgtgaagcaggtggaacaccctttgctgagtggtctgctgtaccccggtctgcaggctttggatgaagagtacttaaaagtagacgcccagttcggcggtgttgatcagaggaagatttttacctttgcagagaagtatcttcctgcacttggctactcaaaacgggtccacctgatgaatcccatggtccctgggttaactgggagcaaaatgagctcgtcagaagaggagtccaaaatcgacctccttgatcggaaggaggacgtgaagaaaaagctgaagaaggccttctgtgagcccggcaatgtggagaacaacggggttctgtccttcatcaagcatgtcctctttcccctcaagtctgagtttgtgatcctgagagatgagaagtggggtggaaacaagacctacaccgtttacctagagctggagaaggacttcgctgctgaggtcgtacaccctgg

SEQ ID NO: 1215 - DNA, 459 bp, Mus musculus
ccccctttccctttattttcagttgcttgctgtaacccagataataaaaaccaaccacacaaaactgtaccccacccgttcccccttccccccagtctacctcctgggttttaggaatgggtctagagggggaggcagggggggccaacgccacggggaggaaatgaaaattggcccagagacgggggtacctcaaaaaaaaaaaaaaaaaaaaagaaataaattaagggccctcctccccttctctccagggtcagggtcttcccccaaaggccccagggggcagagagcagcttctggggtctgcctccccaaaatttggttaaatggtgcccggccaggaccctgaagaccactacctggggcaggggtaaggctagggggaaccaaaaattggcatctggagtatgctcacccctggcacgggcagggatctctgatttacacgagccaccccca

SEQ ID NO: 1216 - DNA, 588 bp, Mus musculus
cgaagcccggctctgagctccacccccttcttcctccctgtacctcccacccagggtctgaggcagggccaggccctcttcccgggtccccactccttcctctccttttggaatcctcaacttctgaagtgaatgtcactccatgttctttccctgccccacccttggactctcctgcgtgggtgcagtctccactccaagccccacctgccatcttgtcttgtgggacagttgcctcccctcatctcaagtggctcatccgatacaagggtggaagacattccatcccacccgtccctcaatggtctttgtgtggccttctctccctctccgccctacactggacaatggacttgtctgttgcgttctgaggagcaatctatccttcacccccaagtccacagcctgatggggctcgtctcctagtgaggactcctcatcctgtggctggaagctgcacctgacactcctcacaggctcacctggggactgactgcctcagtactgtcacctccatggggctgacacccaccatggggctggctcgtgtaactcagagatccctgcccgtgccagggctgagcatac

SEQ ID NO: 1217 - DNA, 730 bp, Mus musculus
atcacacacggctgacaagtttttattacacccttgtgcactggcactgacagttgggatcacactaaagcccgggggagggagcacacacaaccccctaacagccatggggtataacacttctcaacaactcatcggcttatactaataaagtcacagtccatggcacatcagcaaaaggggtgaggtaggtaaaggtacctggccgatggcacagggtcaatgtccttcctggacccaggctgaagtgggggatcaacacaggacagggttgcctcgggaggagcctttgttagtgacagaggctgaagcacacagccacaaagtcaaaacaaggcaagtgtgtccagggtgataagttcaaggccaaccagaacatataatgatttgtctgagtcacagcaaacatggcctgggctggctcctttccatggctgggaagcttttgtctatctgcagcctgattaatttattactggaaacagctcccaagccaggcttcccccaaacccaggagcaaagtcaagggaacacttaggagatcctttgctatttgtgattctctacaaccctacggcactttgttccagccactaactgattcggagttcagagaacttggagggtgagtcccggagagacgtaggtagaagggctaagaaaggaaatggcttagcttaaaaacaagaactggagctgggcctggtggcaaagccaagaatcaactact

SEQ ID NO: 1218 - DNA, 741 bp, Mus musculus
gcaattcaaggcttttgttatttgttttgtcggtaaaaacatcaaagatctccagatgcagccagaaagcatttcccagggcagtttctgggtttacctgtttgcgtgtctgttaacataggaactcagtccagggcaggttaaattcacattaatgtctgacccttctgccctgtggttctagttttgagtctgaacagagagatgggggcatttttccagttatgccctgacctcgagagaatgtcctggtaggagtgcccctccacttaggccccatagccttggctcaatgtccaagcctcaggcctggctcttttcatcctgatctaggctggtctcaacattcagaagctgctggcatgctggcctcctggtgtcgtgtagtctgtgtgaaaagagcacttctgtcttctcctccactctgtctctgtacgcacacgtttctccagcctcacatcagccataaccagcatgctgtggcgctgaagtcatgccagccttggctcctccttgtcgtgggctgtgggctccaagggcaggcagggcctggctgtctagctaagtcccccagtctaagctggttctgtcaggagacaccccctccccccatccctaagcactagtgtccacaatgcatttgaggaacattgtgtcatctttgacgtaggcgtgcttgggtgactgcagcttgctgagggggaagaagagcgggcagcgctggccacgttggtctcactc

SEQ ID NO: 1219 - DNA, 705 bp, Mus musculus
caaagtcaggctagagctccaactgaaactttcgtttcatgcaagattgattggataggaacactccctgataaagaactacataattagaaatgagttacagggaggataaggacaggggcttcacattcaataaatagagctcaagacgttacagattcatgctgacagggctgtggcattgccagagtctacagtcaaactacaagtactttacgtgcacactacaaggatgttttcagcatctggtgggaaagtaattgcaattaggactttggaggattaggtgatagggcacaaaggttcgatttcaaagcattattcactacagtgtttgtttctaggcagttacatggctcacctatgctcactatatccattataatggtgaacaaaacacctagggacagaatagcaagcccaacttacagtcccccacaaaagctaaaattcatgtcattgattagagtgactgcaactgatcaggagctgaaagaggacagaaaaatttaggaagaaggccctttccctcagagcttgaaggcttctctgtaacctacgccaacaagtctggggaaaaaaggctaacactttcaatatttaagctttttgggcacttcccatgggaagctgtccctaccaaagtggccataggctgcagtcctctgataaattggcttcttcagatccagatccctgacaatg

SEQ ID NO: 1220 - DNA, 585 bp, Mus musculus
tccagcctgccgagagctgaagcgatcctccctctgtgtcttccgcagccctccgcctcgccgcctctcagtctcctcagagtcgccctctctcaccgccgccgccatgaacgggcagctcaacggcttccactatgcgttcattgaggaggggacgttcctcttcacttccgagtctgtaggggaaggtcacccagataagatttgtgaccaaatcagtgatgctgtccttgatgcacaccttcaacaagaccctgatgctaaagtggcttgtgaaactgttgctaaaactggaatgattcttcttgctggggaaattacatccagagctgccattgattaccagaaagtggttcgtgaagccataaagcacattggatatgatgactcttccaaagggtttgactacaagacttgtaatgtgttggttgccttggaacaacagtcaccagatattgcccaaggtgttcatcttgaccggaatgaggaagatattggtgcaggagaccagggtttgatgtttggttatgccactgatgaaactgaagagtgtatgcctttaaccattgtcttagcacacaagct

SEQ ID NO: 1221 - DNA, 743 bp, Mus musculus
ctaatacatgtctactttattaaggtcaaccaacatggtatctatgtctctaagcatttcaggtttaagagatgtttagattatttttttttctatagtaagttaacttaggcacaccggtttgtattttagaaaaaaataattatctctatgacacagacaggaataaggagtatctgcaaatgttacaaagacgattctaaacctgagctagcctctctctctccaagtggctagcagccattagtctctgtgaaaagaaataacaggaactgcgcaaacatctgtaatagtctggaacttagagagcagaagctgtgattatcgaaaacctcgaacactggcaaggctggattgcaaagtatttaagagaaggccacaaatgttgtttcctaagaagagctaggaactgcaggtatcacttggtagtgcattgaaatggcattgcccagtgcaagtgctgaagagatcagtcggtcgcctccttctagagcagtcatttggggtaagcttccacaatcatagcatgaccctgtcctccagctgcacaggcagccactaaagcatactggcctccatccttcctcagtctgttggcagctgccatgaccagccgacagccagtggctccaaaagggtgccccagagacagtgatccgccccagatattaaacttctccagaggaggtgatccaaccttggttttcctacccatgtagttttgtgcaaccaatcagaatcca

SEQ ID NO: 1222 - DNA, 586 bp, Mus musculus
acagctgcaaattcttctttcctgactgatggcgcttctgcgatgctaatcatgtcagaggacagagctctggccatgggttataaaccaaaggcatatttgagggattttatatatgtgtcccaggatctcgtagtatcagcttttactcggaccaacatatgctactccaaaagttttagaaaaggcagggttaaccatgaatgatatcgatgcttttgaatttcatgaagccttctcaggccagattttagctaactttaaagccatggattctgattggtttgcacaaaactacatgggtaggaaaaccaaggttggatcacctcctctggagaagtttaatatctggggcggatcactgtctctggggcacccttttggagccactggctgtcggctggtcatggcagctgccaacagactgaggaaggatggaggccagtatgctttagtggctgcctgtgcagctggaggacagggtcatgctatgattgtggaagcttaccccaaatgactgctctagaaggaggcgaccgactgatctcttcagcacttgcactgggcaatgccatttcaatgcact

SEQ ID NO: 1223 - DNA, 741 bp, Mus musculus; identical to SEQ ID NO: 1218

SEQ ID NO: 1224 - DNA, 552 bp, Mus musculus
gaggatcggatctgtcctaaatgcagagcagacaacctccatcctgtgagcccaggaagccctctgactcaggagaaggttcactctgatgtagctgaggctgaaatcatgtgcccctttgcaggtgttggctgttccttcaaggggagcccacaatccatgcaggagcatgaggctacctcccagtcctcccacctgtacttgctgctggcggtcttaaaggagtggaaatcctcaccaggctccaacctagggtctgcacccatggcactggagcggaacctgtcagagctgcagcttcaggcagctgtggaagcgacaggggacctggaggtagactgctaccgggcaccttgctgtgagagccaggaagaactggccctgcagcacttggtgaaggagaagctgctggctcagctggaggagaagctgcgtgtgtttgcaaacattgttgctgtcctcaacaaggaagtggaggcttcccacctggcactggccgcctccatccaccagagccagttggaccgagagcacatcctgagcttggagcag

SEQ ID NO: 1225 - DNA, 138 bp, Mus musculus
ggggggggggtttttttaaattttttttttttttttttttttttctttttttttttttttttttttttttttttttttttttttttttttttttttttttttttttaaaccccccggggtaaaatttaaaaaaaaaaa

SEQ ID NO: 1226 - DNA, 431 bp, Mus musculus
tttgttataagacgtaacgtaacctactgttcatgtttgctctggtctgaagtgtttagctgttgagctggattccttaggagaccaaattaagatggcttaaattacatcttaaaattttcatttcctgtagttaattctgcatgtattagtcttagaagtaaacacaagttaaaacaacctgacaggaattccccaagtggcttgttttccaaagtcccgagaacaaccccaagtttcctaggtcttgtaactcagcaaggcttgtgaatggaaataacagtgcccaatcacattctgctttaaaagataaatacagaggagataaaaagaaaaaaaaaaaaaaaaaaaaaaaaaaaaaaaaaaaaaaaaaaaaaaaaaaaaaaagggaaaaaaaaaaaaaaaaaaaaaaaaaaaaaaaaaaaaaaaaa

SEQ ID NO: 1227 - DNA, 451 bp, Mus musculus
ggggggggggttttttttgcttaaaaacaaacaaatttattgcgaagaatgccaaacagaaagagcaggggaagcttctagaaatataatgcgggcatcttgcctgaggaagactccacccaaactgggagacaggcccactttaggtctggggggtgctggccgcgcatggggaggtggtcgaagagcttctccggatcctgattttccggagcccccaaccggcgcaggttggtcatggagccgcgccatctccttgaggatctctacctggtggggcagaaaatggcacttcaggaaggtgcacaggtagagggcacctttggtggtaggcaggccatacaggtgcagaagggtctggttgaggggtttctccagatggaacgggcactccatcggcatgagggcatccaaccaggcctggcgggcttgattggcaattctcccaagg

SEQ ID NO: 1228 - DNA, 500 bp, Mus musculus
tccacagctcacaaacggtcagttgctgccttcctgctccagccgacctcgtgctgccatggccgcttctgttccacagctcgagcagacttacccgtcggagtctaacgctgccctcaactcacagatccagttgcagctgtatggcagttacatctacctctccatggcctcgttctgcaataaagaagaggtggccctggggtccttcgcgctcttcttcctgcgtcagtctcagaagtggatggaacgcaccgagatgctcttctccctgctgaccgagcgccagggctccctgacccttgggagaattgccaatcaagaccgccaggactggttggatggcctcatggcgatggagtgcgcgttccatctggagaaaacactcaaccagagccttctgcagctgtatggcctggctaacagcaaaggtgacctctacctgtgcaacttcctgaagtgccattttctgccacagcaggtagagatcctcaaggaga

SEQ ID NO: 1229 - DNA, 509 bp, Mus musculus
ggggtgggttttgagacaaactttttttttttctttttttgggtttgtgttcattttataactataaattcaaggttagggaagcttggttttggcctggaaaacaaaacaaagactaaacaaaggttttttggtggtattatttgcgagggggggcctcatttaaaaaggggtggaactggatggctagaacacaggttctagcatgaatgatgcaggtgactggtggtactaagaggagacaatgaactggtgacaagattataatctggtggggggattggtgaaaaaaaggccttggaaatttctaaacaacaggaaactctggtaggaatctctaaaggggcttacaggccaaaaagggaacaagggtaggaaaatggcccaacagaggttgaggaaaatactggatttgagaggtactggaattgggtatggaaaaataggggtggagggagggatcatgcttacaatagggctcaaattcaaactacaatacaccacttcac

SEQ ID NO: 1230 - DNA, 591 bp, Mus musculus
gatactgtcgtcctgcggccgtgccgcttccagtctccagaccatgtctcacttagtcgagccgccgccgcccttgcacaacaacaacaacaactgcgaggaaggggagcagcccctgccgccgcccgctggcctcaacagttcctgggtggagctacccatgaacagcagcaatggcaatgagaatggaaatgggaagaatggggggctggagcacgttccttcctcgtcttccatccacaatggagacatggagaagatcctcctggatgcacagcatgagtcgggacagagcagctcaagaggcagttcgcactgtgacagcccttcaccacaagaagatgggcagatcatgtttgatgttgagatgcataccagctagggaccacagctctcagtcagaagaagaagttgtagaaggagaaaaggaagttgaggctttgaagaaaagtgcagactgggtatcagactggtccagtagacccgaaaacatcccacccaaagagttccatttcagacaccctaaacgtgctgcgtctctaagcatgaggaagagtggagccatgaagaaagggggcattttctctgcag

SEQ ID NO: 1231 - DNA, 566 bp, Mus musculus
  misc_feature (1)..(566): n is a, c, g, or t
cctacaaaaaaacgtaagattgatttttttttttaaatagcaagaaaaaatttacagacataaaattttgttaccaggtggccaaaaagaggttccttgcccacagcaaactgatagctatgattcactggctgggtcggagggcggcttggaaatacctacaaccctgggaaagagcttgcctgacacagggctggctcagaacaggcggtcataagaccctcaccttaaagaacaagggccacaaacatgacctgcagggagaagccactggtgggtaaggccttgcacatacctggcccctaagacagggcctccctaggcaatggaccctgaaggcactggggttcaaaggatggtcatcccacattttatgacctgaaaaaatggataaattaagatcctacaaaatgatggctggtcaaagaaatgtcaagaagaggaaggtgtggtgccctgacacttgcagccatgcttggggaggggtggggtggaaaggggttggnttaaggggttcatcagcaaaccagccantgtgtgtgtgtgtgtgtgtgtgtgtgtgtgtg

SEQ ID NO: 1232 - DNA, 580 bp, Mus musculus
gtttttttaaaaattgaaagttacattttttttctgttaagtctggaagctttgagctgtagacctccggattaatttatattccatatgaaaagggctcttcaaagcggggtgtcagcatgaagttctgctgtgttgtacaggacaaaggagaatgaatgggaccttctcctgattaagggctactgagggctcagtgcagggcacgtgtgcaccaggcttggtgagagtgagcaagcgtgagctttgaaaccacacgagccacccccggttttgtaagggcaaagatctgaaaccagcaagggccttctgcttacgaaacctcgagcccatcccttctgtttactcagattctcttaggattttaaaacaaccaaacatcccacagcctactggcatagtgttggcgaacagtgcacttgcttgttacggttttgttttgtttttttaaatcacgtgaccagttatattgctatgaaaatggtggagatgcctcgtagaaggcgagtgctgggtgcacatgtgacattttcttcagggagcgactcatggtgagaccagagagggctcttagcttgca

SEQ ID NO: 1233 - DNA, 286 bp, Mus musculus
ctttggggtttttttgagctttggggttttattaggtccagatcttagggttatggacaggagggaagagcactggtttaaaaacaaaaacaaaacaaaacaaaaggacctaaaggggcttggaaggcgaatgcgcaggggactacttaggaggggaggccaggcctcacccggcaggaggcctgggctggggccttctgacactggcaggaacccctgggacggacgcgactgggagacaggccccatcctggtagacaccccaaggtcttcccttggccaggtg

SEQ ID NO: 1234 - DNA, 582 bp, Mus musculus
gcggcggcagctctgcggggtggctggtgccgctgtccgcggaggtgcctaggcagcggaatccaatttctctccagccacaacctaccccatggttcaagctaccagataagccggccaggaagagagctgacactgaccaaatcttattcttctgggagcagaaaagggtttttgtcaggcttgctagataacatcaaacaagaattagccaaaaacaaagagatgaaagaaagtataaaaaagttccgagatgaggccaagaagctagaagagtcggatgctctccaggaagccagaaggaagtataaatccatcgaatcggaaactgtgcgtaccagtgaagcaataaaaaagaagcttggagaattaacagggacagtgaaggagagtcttgatgaagtcagtaagagtgaccttggccggaagatcaaggagggggtagaagaggccgccaggacagccaagcagtcagcggagtcagtgtccaagagcggggagaagctgggcaagacggcagccttcaaagccatctcccagggtgtagagtcagtgaagaaggagcttgacgagagcgtgctt

SEQ ID NO: 1235 - DNA, 488 bp, Mus musculus
ggtgggggttttttttttgcttcaagacccaatctgggctgtgtcttagggccctgcccttctcctgcgccacctgaggacaggccactgcgcttggcttttggaagaggctttcccttggccatcattttggttctgaggcttggtcgggtgttcagatttattttctttttctttcttctttttatctttggcttctgcgcccaggagcagacacaggcttatactcggttcctggcaggggcttggactgggccttcaggtggagaaggtcttggaccggcgaatccacttggtccttagaggccttttcaggtttaaggtttcgaactacttctccttggcaaggcactctggcaaatagcactttggcttctgggttctccggtccaggaggctgagcattactggcagggtttgaatgggagttctgcgatgctgggggctggccaggtacataggccttcccaggcttttctttatactca

SEQ ID NO: 1236 - DNA, 575 bp, Mus musculus
tcgccgccaggaaggcagcccgacgagtagaccgcagctcctgggagatggcggcgctgtgcctcacggtgaacgccggaaaccctccgctggaagctctgctggcggtggaacatgtgaaaggtgatgtcagcatttctgtggaagaagggaaagagaatcttcttcgggtttctgagactgtggcattcactgacgtgaattcaatcctgcgctacctggctagaattgcaactacgtctgggctgtatgggactaacctgatggagcacactgagattgatcattggttggagtttagtgctacaaagttgtcttcgtgtgataggctgacttctgcaatcaacgagcttaatcattgcctgtctctgagaacatacctagttgggaactccttgaccttagcagatctatgtgtttgggccaccctaaaaggaagtgctgcatggcaggaacacttgaaacagaacaaaactctagtccacgttaaacgctggtttggctttcttgaggcccagcaggccttccgctcagttggcaccaagtgggatgtttcaggaaacagagctacagtg

SEQ ID NO: 1237 - DNA, 509 bp, Mus musculus
tcactcgccgcagacggcctgcctcgcctcgtgctctcctgccgccgccccgcagaaatgcttcgactacccacagtccttcgccagacgagaccagtgtcccgggcactggctcctcatctcactcgggcctatgccaaagatgtaaaatttggtgcggacgctcgagccttaatgcttcaaggtgtagaccttttagcagatgctgtagctgttacaatggggccaaagggaagaactgtgattattgaacagagttggggaagtcccaaagtaacaaaagatggggtcactgttgcaaagtcaattgatttaaaggataaatacaaaaatattggagctaaacttgttcaggacgttgccaataacacaaacgaagaggctggggatggcaccaccactgccactgttctggcacgatctattgccaaggagggctttgagaagatcagcaaaggggctaatccagtggaaatccggagaggtgtgatgttggctgtggatgctgt

SEQ ID NO: 1238 - DNA, 552 bp, Mus musculus
caactttaaatcagtttattgacacagtaacacaacacacttgtctccctgacacccccacacccaatgtagatctctctcccttttctctttagaacaagctgtttggtgaaagcagtaaaaggcaggccatttctgcagtccagccctacctctcagctctgcagcgcaggcactgttctgaacctgttaaggaggcaggcagtactgtgcttggccagccagaggcatccaggcgctaagaacaggctcccccacaaaccccaggccctgagtttggtattcttcctctctgctcttgcaaggaaagagatcctggggcctaggccacagaggcaagagctctggtggtaacttgagatgtagtttggctagtttcttaaggcccaggcaccccccaaaaagccctggtgtgggggagtgagtttcaatgcccctatttaaaatgcactggtaacattaaacagattaagccagcttaaccaaatgccagaataacactaagctgtaaagaaagcaaggtcagacctgcttacaccaggccagacacaa

SEQ ID NO: 1239 - DNA, 561 bp, Mus musculus
gctgaggcaagaggagggcactcggcccgcggcctgacagggacttagcccacagagaccggcccgcgcgcgcgaccccacacccacccactcgtccacctacccactccccgcgccgcctcctcccaccctgagcagagccaccgaggatgataaacacccaggacagtagtattttgccgttgagtaagtgtccccagctccagtgctgcaggcacattgttccagggcctctgtggtgctcctgatgcccctcacccactgtcgaagatccccggtgggcgagggggcggcagggatccttctctctcagctctaatatataaggacgagaagctcactgtaacccaggacctccctgtgaacgatggaaaacctcacatcgtccacttccagtatgaggtcaccgaggtgaaggtctcttcctgggatgcagtcctgtccagccagagcctgtttgtagaaatcccagatggattattagctgatgggagcaaagaaggattattagcactgctagagtttgctgaggagaagatgaaagtgaactacgtcttcatc

SEQ ID NO: 1240 - DNA, 559 bp, Mus musculus
atgttcttcataaagcaagtttatttctgcagaggaagtgtcttatgtttacatccagggaagaagcagaaagaaactccccctctcagaactgggtccccgagtcctcagtagcacgttgtgtctcaacgatctttactggggaccaaagaggttgggatcatgaagagtcaaactagttaccagctgttcaaagttactcaggctccaaggtggacatgacagattttcagggccaagagacctgctgtgacacgggggctgattgaaggtgagcaaaagatcagtctgatactggggcagccgcagcaaggcctgatgcagtgtgacatcctttgctacctgctggttttctttagctacctgctgcttgccagaaagggaccaggcatcctgacagcagcctctcagggataagttctccaaacagagaggctgcacagatagcacgtgcacagccctagccccctgcacccggccaacgtcctcaaaatggtaccgcgcagccgcttcgccctgcacgtgggcctgcagctccagaagttctatgatcagactc

SEQ ID NO: 1241 - DNA, 576 bp, Mus musculus
tctcaaaggctcatgtaggtttctttaaaacctcgctaatgtccagactcaagtactagatctatggagcccaacagaaactgtccactgttcggaggcgccttctccgccatcctccctacaggggccatttttgtgagtgacctccgaccggtgccagacaaccaagaagttttctgccatcctgtgaccgaccagagtctgatcatagaacttctggagctgcaggcccacgtgcagggcgaagcggctgcgcggtaccattttgaggacgttggccgggtgcagggggctagggctgtgcacgtgctatctgtgcagcctctctgtttggagaacttatccctgagaggctgctgtcaggatgcctggtccctttctggcaagcagcaggtagctaaagaaaaccagcaggtagcaaaggatgtcacactgcatcaggccttgctgcggctgccccagtatcagactgatcttttgctcaccttcaatcagcccccgtgtcacagcaggtctcttggccctgaaaatctgtcatgtccaccttggagcctgagtaactttgaacagctggta

SEQ ID NO: 1242 - DNA, 545 bp, Mus musculus
gttctctttctcctctctcatttcattttcctctcggctttgaaccgagcggcttttctttagcttctgacctgactctttaatacatatcttaattttatggagtctttccatcatctttttattaatacagtaagtccaacggtctgtccggtgaaggatacggataagctgaatagtggcttcagctagcactgctgctactggactacaaatagggtctcctggaagtaaatcccgtggcgtgccacgcatctgcatatcacaaattttcaccttctcacccgggttgctgctatagaacattacacatgggtacaactctgctgcatccacatcttcaaaggctaatttgggttcctctccatttttcccaaaggaaatggtcctggcttccatgtctaacacacaggtaataaaatccccttgagtaaagctggacagcgtcagagtctgttctccattgtgatagaggttaccactatacgccctatagagccacatgtctgaggtagtgcggtgattaaaatcatgtactggccagc

SEQ ID NO: 1243 - DNA, 588 bp, Mus musculus
ttaagaacgaggcttcttgctcttcacgtccttgaggctgtgctaccagcttgtgaatctggtgtagaagatgaccaaatggcccaggttgttgaacgcttattttcccttctgtcggattgtatgtgggagattcccattgctcaggccaaacatgctattcaaataaaggaaaaagaacaagaaataaaattgcagaagcaaggagagttggaggaagaggatgaaaatctccccatacaagaagtctcttttgatccagagaaggctcagtgttgcattgtggaaaatggacagattttaactcatggcagtggaggaaaaggatatggattagcatctactggggtgacttctgggtgctatcagtggaagttttatattgtgaaggaaaatagaggtaatgaaggtacatgtgttggagtctctcgctggccagtacatgattttaatcaccgcactacctcagacatgtggctctatagggcgtatagtggtaacctctatcacaatggagaacagactctgacgctgtccagctttactcaaggggattttattacctgtgtgttagacatggaagccagg

SEQ ID NO: 1244 - DNA, 178 bp, Mus musculus
ggggaagccagatattttactcattttttaagcaggctggacttgttcccccctcccatggattccagggctccagatctggggaaaagttgagctggcctaaaccatagcttttttttccggggggctgaaggcaagccctgtaaaagaggaggcaggcctggagggctcagggggg

SEQ ID NO: 1245 - DNA, 590 bp, Mus musculus
aagaggtcgaaggtgctgcgcgtgatccaggatccgaattggcccggagcaggagcatggcgtcgtcggggtcggtgcagcagctgcccctggtgctgctgatgttgctgttggcgagtgcggcacgggccattctctacttccgctcgggccagacttgctaccatcccattcgcggggaccagctggctctgctggggcgcaggacttatcctcggccgcatgagtacctgtccccagcggatctccccaagaattgggactggagaaatgtgaacggtgtcaactatgccagcgtcaccaggaaccagcacatcccacagtactgtggttcctgctgggcccacggcagcaccagtgccatggcagaccgaatcaacatcaagaggaaaggtgcatggccctccatcctgctgtccgtacagaatgtcattgactgtggcaatgctggctcttgtgaagggggcaatgaccttccggtgtgggagtatgcccacaagcatggcatccccgatgagacctgcaacaactaccaggccaaggaccaagactgtgacaagtttaaccagtgtgggacctgcactgaattc

SEQ ID NO: 1246 - DNA, 574 bp, Mus musculus
ctagctgaagctgctgaagggtccttcgttgagctgccgtggtctccgccgccttatggcggcgatcggcgtgcacctgggctgcacatcagcctgtgtggctgtctacaaggatggccgggccgatgtggttgaaatgatgcaggggatagagtcacaccagccattgttgcttactcggaacgtgaacaggtggttggactggcagcaaaacaaagtagaataagacatgtttcaagcacagtagtgaaagtgaaacagatccttggcagaagctctgcagatccacaagctcagaaatacatctcagaaagtaaatgcttagtcattgagaaaaatgggaagttgcggtatgaaatagatacaggagaagaaacaaaacttgttaatccagaagatgttgccagactgatattcagtaaaatgaaagaaacagcgcattctgtcctgggctcagatgcaaatgacgtggttgtcactgtcccatttgactttggagaaaagcagaagtctgctctgggggaggcggctggagctgctggatttaacgtgctgcggctgatccatgagccgt

SEQ ID NO: 1247 - DNA, 176 bp, Mus musculus
agtaataaattgtattttaatagaaacatagcttataccttcattgaaaaagcagtttattataaacaacacatctacacaaaaccaattttttttttttttatatttcaaaaaaccatcttggtttatctgaagagtcaggatgcaacctcaacagtaatggcctcacacttgcc

SEQ ID NO: 1248 - DNA, 504 bp, Mus musculus
cagatagcacatttcactttattaaacattaacgcacaaatggatatgtgctgtaaaagagggctgaaggacaccacaggagcagaaagggacactcagagaccaacctcacaaaaagggctcaatattgatttccagagaggaacagggcatggtcagctcaaatttggtgataacatcaggatgaaggacgcctagcttcccaatgctttgacctccaacaaagatctcagcacaccgtccagggaaaaaggcagaacctgcagacgctttgatcatgtagcccccgctttcctcaccaggaggcacatcgagcagctgcataattctgtccagcaagccatggatgatctcaaacccgggagtcttgttgtaataaacagcacagagatgcctgtagtttttcgcacctacatctttgccagaatcttttactacaacgtcagagatttcaaacagtttgagaggaaggggcatcttccggtttgctgcaatggtctttag

SEQ ID NO: 1249 - DNA, 593 bp, Mus musculus
tttatcaggcccatttacttacaccgcgaaacgtccttcagatatcaaattcaagcctctgaataagaccaaggagtatacagcttgtgaattaatgaacatatacaagactgacaaccaccttaaacattatttacatatcattgaaagtaagcccctgtatccagttatctatgacagcaatggtgtggtcctgtcgatgcctccgattataaatgggaatcattcaaaaataacagtaaatactaggaatatatttattgaatgcacagggactgacttcactaaagcaaaaatcgtgcttgacattattgtcaccatgttcagtgaacactgtgaaaatcagtttacagttgaagcagttgaagtagtttctcctaatggaaaatcaagtacctttccagagctgccttacagaaaggagatggtgagagctgatttaattaacaagaaagttggaatcagagaaactcctgcaaatctcgccaagctcctgaccaggatgtgtctgaagtcagaagtcataggtgacggcaatcagattgaggttgaaattcctccgaccagagcagatgtcatccatgcatgtgaca

SEQ ID NO: 1250 - DNA, 603 bp, Mus musculus
gataaagaacatgtgttttagtttatccttgaccaatttcaagtttgcataagccactcaacaaagaaaaaaaaatcatagaaaaaaatacaggaaagtaggaataccctcacagaataagcatgggtataacatggtaagaagagaaaggctgggtgcttctccgttatctattgtccactgtcttacagttaccccacagacccactagatgaaagaagagacatttgaggtggagaaggggatacctggtggatgacataaatgccgtacgcaagctgctggcgctgcaggaaagggtgcaggtgatagagcagcagccgaaggtggtgctcccgggcacgatggggcacaattatggctgttcgggagcgaggctcacaccctgcaggacggtaccggccccctgattccacccggggattccgctccacaatctccgctagtgacggcactgggctaaaggatactgacacaggacccactgttggtagggaaaggcaaggtcagaaatcggaggcacagggataaaatgggtaggtatcaggacctgagaagaggtttggagaaaacagcctgattctgagctcagtttcccagcag

SEQ ID NO: 1251 - DNA, 558 bp, Mus musculus
tgtttgcttccagaaatcccttcactccttacctagctctcaagtcaggatgttgcggaggctgctggagagaccctgtacattggccctgcttgtgggctcccaactggcagtgatgatgtatctgtcactagggggcttccgaagtcttagtgccctgtttggtcgagatccgggcccaacattcgactattctcatccccacgatgtctatagtaacctcagtcacctgcccgcagcccctggagctgcaggggctcctccggctcaagcattgccctactgtccagaaagatcacccttcttaggtgagtagaaaggaaagacggtgaagaagagaacaaggtttgggggtagggagtcttgggcaggcgtgcagcgagccttagactaatggactctaaggtgggccgatgttgtgaattcagaggtaggctcttgggtcacaagcttcccatggcctgcctgttgtatgggctcttcataccctagggtgggaatcatttcccctgtagatgagtcttggcttaattgggtagttcttttttgtcttccgct

SEQ ID NO: 1252 - DNA, 248 bp, Mus musculus
ccccccccggggaaaaaaaaaaaaaaaaaaagggaaaaaaaaaggacattaacccccccccccccggggagggggggggagggggggccccccaaacccccaaagaccccaaaaaacaaaaccccccccccgggggaaacccccaccccaaaaaaaaaaacccccggggcccgggggggaaaaaaaaaaatggggaaggggcccctcctaaaaaaccccgggaaaccctttggggggggggccccccc

SEQ ID NO: 1253 - DNA, 571 bp, Mus musculus
accatcctgtttggagctgcttacacttgcttggaggctgccacagggagggctctgctgcgtcagcacatgaatgtctccggagaggaaaacccactcaacaagctccgggtgaagattgaaccaggtgtggaccccgatgacacctacaatgagaccccctacgagaaaggttactcctttgtctcatacctggcccacctggtgggtgatcaggatcagtttgacaagtttctcaaggcctatgtagatgagtttaaattccaaagtatcttggctgaagactttctggaattctacctggagtatttccctgagttgaagaagaagggagtagattccattccaggttttgagtttgatcgatggctgaacacccctggatggcccccctacctctccgacctctcccctggggactcactcatgaagccagctgaagggctggcagaactgtgggtgacctcagagccagacatgcaagccattgaagccgtggccatctctacctggaagacctaccagcttgtctacttcctagataagatcttgcagaagtctcctctccctc

SEQ ID NO: 1254 - DNA, 575 bp, Mus musculus
aacagtaacacatttattgtaccacccagcagagtacaaacacaaataagaaaaataaaacactgggcaagttctactctacaaacacaactcttaacctatgacaagttcctcagtcattctggtcgtcatcccagtccttcttcccacttggaggtttgggcccaccagctggttttgccatgatgatctgatccactcttagtacagtgactgcagcattagtggccagtttaatagcccagtattttcccaagtaagtatctaaaatactggcttctaacatatcctttacagcagggacttcagcctcgatatccaaccccacatttttgtttccttcttggtgtacggaataaagtttagagataacttcattggccttcacgccagaattttctgccagtgcccgtggaatcgcttcaaacgcttcagcaaacttcttaatagcatactgttcaagcccaggacacgtctctccatatgatgtgatttgtttagccaattcaatttcggtagctccacctccaggtacaagacgcttatcccttgtgagaactttgaaagtattaact

SEQ ID NO: 1255 - DNA, 562 bp, Mus musculus
gccgagccatggcgcttcacgtccccaaggccccgggctttgcccagatgctcaaggatggagccaaacatttctcgggattagaagaggctgtgtatagaaatatacaggcctgcaaggagcttgctcagactactcgcacagcgtacggaccaaatggaatgaataaaatggtcatcaatcgcctggagaagttgtttgtgacaaacgatgcagcgactattttaagagagctagaagtgcagcatcctgctgcaaagatgatagtgatggcctctcatatgcaagaacaagaggttggtgatggcacaaacttcgttctggtgttcgctggggctcttctggaactagctgaagaacttctgaggattggcctgtcagtatcagaggtaatatcggggtatgaaatagcttgcaaaaaagctcatgagatccttcctgagttggtatgttgttctgccaaaaaccttcgagatgttgatgaagtgtcctctctgcttcgaacctccatcatgagtaagcagtacggcagcgagacgtttttggccaagcttattgctca

SEQ ID NO: 1256 - DNA, 664 bp, Mus musculus
  misc_feature (1)..(664): n is a, c, g, or t
gtttattggaaaacctttaatatgtgtctcacccttcattgctgccaagtagaaaacgggataggagtgaggaggattgttggaggcacctctaagattgggctgtgggtgtcaaggcatgggatccgggacgttagattcggcctctaggtgctaacctcaacctgtgcatccttccatgcttgtcgcactgtgattttcactttgaaagggtcgatcagaaagaccaccttggggtcacccaccagacagggcagctgtttgtcatctgacacatcaaagtcaaacctctgcagcagcaaggccatgaagataaagagctcctgccgggccagagcctctccaatgcacgatcggggaccagctccgaagggcaaataactgggtgtgggtgtaatgagatggcttcctgttggatctaagaagcgctcaggcataaaccgatctggctggtcccattcatttttatcgtgatgcagtgcccagagattgatgatcacatgtgtgtccttcgggatggcaaactctccaatgctggagtcaatgttagccttgtgtgggatgggcaagggggccaccggcctgatacgaagcacttctcggatagtggcctncagcatgaggaggtgagtccggtcattgaaaagacgtgttcgactgaagc

SEQ ID NO: 1257 - DNA, 565 bp, Mus musculus
ttgtcagtatgtcaggaagccaactcactgtgtgacttgatacttacatacgacggggagtcccgagatctgtctacgctcatcttcaagtcagtaatcaatatcatctgtaccatctgcttcaacatctcttttgagaacaaggatccgatactgactaccatacagacctttacagagggtattgtggatgtcctgggccacagcgatctggtggacatattcccgtggttgaagatttttcccaataaaaacttggaaatgataaaggaacacactaaaattcgagaaaaaacactggttgaaatgtttgaaaaatgcaaggagaaattcaatagtgaatctctctccagcctgacagacattctgatacaagccaagatgaatgcagaaaataataacactggggaaggccaggacccaagtgtgttctcagataagcatatccttgtcacggtgggagacatctttggggcaggcatagagacaactagctctgtgctgaactggatcctggctttcctggtgcacaatcctgaggtgaagaggaagatccaaaaggaga

SEQ ID NO: 1258 - DNA, 436 bp, Mus musculus
gcccctgtgtggagtttaatgtccaacatcaggttggggaggggctagtgcaaggagaccactgggcagcctgaggccagtagtccatgccaaccttggggctaagcacaccctcttgcttgaagcgtgtgtggaacatgtccatcgagtacatttcgctccataagtagccatagtactgagcatcatagccgccagctaggtggccgaaagtggctggcatgttggtacctggtgtggctggcaccccgaggatctcttggcagagccgggcatattcctcagccgggtctgcgtctgtctgtgtgtgcaggacctgatccaccttggcaagcacaatctgccgcaggttgaagagacctgcattggcctggcgagacttgatgagcttctccaggaggtcctgaggggcctcgctgcccgtgcggtagtgctg

SEQ ID NO: 1259 - DNA, 569 bp, Mus musculus
tccacgcatgggacatgcgctactacatgaaccaggcggaggagactcgctatcgtgtggaccagaacctgctgaaggagtacttccccatgcaggtggtcacacgtgggctgctggccatctaccaagagctgctggggctgaccttcacgctggaggaaggtgccgctgcctggcacgaggacgtgcggctctactcagtgcgggacgccgcctctggagaggagatcggcaagttctacctcgacctataccccagggaagggaaatatggccatgcagcctgctttggcctgcagcctggctgcctacggcaggatggcagccggcagctggccgtcgcagccatggtggccaatttcacgaagcccacacctgacgcgccatccctgctgcagcatgatgaggtggagacctacttccacgagttcgggcacgtcatgcaccagctgtgctcgcaggcggagtttgccatgttcagtgggacccacgtggagcgggactttgtggaggcgccgtcccagatgctggagaactgggtgtgggagaaggagcccctgatgcgcatg

SEQ ID NO: 1260 - DNA, 568 bp, Mus musculus
gggaatggaggtctcttctcggagttcagagcctctggatccggtgtggctccttgtagccttcggccggggaggagtcaagctagaagttttgctgctgttcttgctgccatttactttgggtcactgcccagccccatcacagcttccttctgccaaacctataaatctaactgatgaatccatgtttcccattggaacatatttgttgtatgaatgtctcccaggatatatcaagaggcagttctctatcacctgcaaacaagactcaacctggacgagtgctgaagataagcgtatacgaaaacaatgtaaaactccttcagatcctgagaatggcttggtacatgtacacacaggcattcagtttggatcccgtattaattatacttgtaatcaaggataccgcctcattggttcctcctctgctgtatgtgtcatcactgatcaaagtgttgattgggatactgaggcacctatttgtgagtggattccttgtgagatacccccaggcattcccaatggagatttcttcagttcaaccagagaagactttcattatggaatg

SEQ ID NO: 1261 - DNA, 31 bp, Mus musculus
cagaggggctgctgtcttgtgagcgggggct

SEQ ID NO: 1262 - DNA, 514 bp, Mus musculus
cgataagaaaacatctttattttaaatactttggaaagcttaatcatcagtgcctgggggaggctatggtcccagaccccctggcctccccatccccaaggctctggggatcacatgagctgctgaactcgggggggagacaggctggaaagacctggacttctttctggtcagtggaaccagaggtctcctgcctggagggctgagcagacagctggcatttgaggtagggtggccccagagtgtgagggtacagggtcctgtggagactggaaagcaggcagctgctcttttctggtccatggtaacgaggtcctcaggcctgcgccccaaagcccgaagggttctgcttctgccagcgccacagatcttcacacatcctgtccagccccagggctgctgtccagcccagctcctcatgggccaggctggggttggcataacaggccgccacatcaccttcccgccgtgccaccaccttgtacgggatcttcttccctgaggctttctccat

SEQ ID NO: 1263 - DNA, 568 bp, Mus musculus
tcagcgctggagcttccgcaggcgccatggaaaaggtgctggtcacaggtggggctggctacatcggcagccacacggtattggagctgctggaggcaggctactcacctgtggtcattgacaacttccataacgccattcgtggagaagactccatgcctgagagcctgcgccgggtccaggagttgacaggccgctctgtggagtttgaggagatggacatcttggaccaggcagccctacagcacctctttaagaagcacagctttaaggccgtcatccactttgctggcctcaaggctgtgggcgagtcagtgcagaagcctctggactactatagagttaacttaacagggaccatccagcttctagagatcatgagggcccacggagtgaagaacctggtgttcagcagctcagccaccgtgtacgggaacccccagtacctgcctctggatgaggcccaccccacggggggctgtaccaacccctacggcaagtccaagttcttcatcgaggagatgatccgggacctgtgccgggcagacacggcctggaacgccgtgct

SEQ ID NO: 1264 - DNA, 652 bp, Mus musculus
tcagaagtcctggagaaccagttcctccaggccgctaagctggtggagaatcacttggactctgaaattcagaaactggatcagattggtgaagatgaactggagctgctcaaagaaaagaggctggcggcgctcaggaaggttcagcagcagaaacaagagtggctttccaaagggcacggggagtacagagaaatcggcagcgagagagacttctttcaagaggtcaaggagagtgagaaagtggtttgccatttctacagagacaccacattcaggtgtaaaatactagacagacatttggcaattctggccaaaaagcatcttgaaaccaagtttttgaagctgaatgtggaaaaggcaccattcctctgtgagagactgcggatcaaggtcatccccacgctagctctcttaagagatggcaagacgcaagattatgttgttggattcaccgacctaggaaatacagatgacttcactacagaaactttagaatggagacttggttgttctgatgttatcaattacagtggaaatttaatggagccaccatttcagagccaaaagaaatttgggacaaactttacaaagctggaaaagaaaactatccgaggaaagaaatacgattccgattctgatgatgactaga

SEQ ID NO: 1265 - DNA, 536 bp, Mus musculus
atgggttcattcttttattgtccgttgtgttaacctgactgacacaagatcaacaagagcactgtactcctggcaattattacatatgctagaacatggatttgcactgtagacaacacttaacaccagtctatggggtactgcattgctttttataaaggtcaaaataaagatttttattttcaaacaagggactttggttttatttcatacattacactttttcttgcagaaaaaaataaaattgtacaactgcataaatataaaattcttccaccatgaaaatggtcaaaacattcataaggacgcagcaccagcgcatgatgcctccagagaaaggaaagaaggaaaggaaatggacgaataagcaaactacccagcccatcactagccacagtgacaggcagatcccagtctcagacacagctgcagaacacactggaggacacggggagagatggcgagacagcattcagcacggagcacaacacaacccatcaccttgatttttctgtactggcacttaaaatttaaag

SEQ ID NO: 1266 - DNA, 626 bp, Mus musculus
tcttcatcgggaccatccaagtaatgctgctaaccatcagtgaactgaagcccacataccaggaccgagtggccccgccaggattgacacagattccccagatccagaagactgagatctccttccgtcctaatgaccccaagagctacgaggcctacgtgctaaacatcatcaggttcctggaaaagtacaaggattcagcccagaaggacgacatgattttcgaggactgtggcaatgttcccagtgaacccaaggaacggggcgacatcaatcacgaacgaggagagaggaaggtgtgcaggttcaagcttgactggctggggaactgctccggtctcaatgatgactcttacggctacagagaggggaagccctgcatcattatcaagctcaaccgagtgttgggcttcaaaccgaagcctcccaagaatgaatccttggagacttacccactgatgatgaagtataatccaaatgtcctgcctgttcagtgcactggcaagagagatgaagataaggataaagtcgggaacatagagtactttgggatgggcggatactacggcttccctctgcagtattatccctactacggcaaactcctgcagcccaagtacctgcag

SEQ ID NO: 1267 - DNA, 567 bp, Mus musculus
ctctaccaaaaataacaaaatttctttcttctcaattgcactagcatacctcttgataatgtgcatgaacaaaacttctatgctcagagatacagaaatgatgtcttcctaagtgttttggttatctcatggtcaagatatgtttagtctctggttggatggaatcaaggaaataaacagataaaactaccaaggcttgacctgagataaccctgcaaaaatctgccattatctcaactgtcagtctcctttctcccccaaagggaacaaaacaaaacaaaacaaaaaaatcacgaagtgggcttcccacagcccaactccaggtgaatcatcagaaaggatagagagccccaaacaccgcagtgtggggattcagtaaccgctgaagacggctggctcggaatcaggaagaatatccaatcttcaatggcaagcaaggaggcagagccagggcttctaaaacacgtaccgacaagtccaggtccgcggccggacataatccagaaatgtagggttcttcagaggacagtgctggcgggcataccactcttgagaataaaagcacag

SEQ ID NO: 1268 - DNA, 739 bp, Mus musculus
ttgggtgccacttcgatgactttgtgaccaacctcattgaaaagtccgcatcgctggacaatggtgggtgtgcactcacaaccttctccattcttgaagaaatgaaaaagaaccacagagccaaagatctgagagcacctccagaacaagggaagatttttatttcaaggcagtctcttttagacgagctgtttgaagtggaccacatcagaacaatttaccacatgttcatcgcactcctcatcctattcgtcctcagcacgatcgtcgtggactacatcgatgaaggaaggctggtacttgagttcaatctcctggcctatgcttttggcaaatttcctactgttatttggacatggtgggccatgttcctgtctacactgtcaatcccctatttcctgttccagcgatgggcccacggttacagcaagagttctcacccattgatctattcccttgtccatggcttgctcttcttagtctttcaacttggagttctaggttttgtgccaacatacgttgtcttagcatacacactgccaccagcctcccggttcattctgatactggaacagattcgtttgataatgaaggctcactcatttgtcagagagaatatcccacgagtactaaatgcagccaaggagaaatcaagcaaagatccactacccacagtcaaccagtacctgtacttcctgtttgcgcctacacttatttaccgagacaactacccaaggac

SEQ ID NO: 1269 - DNA, 519 bp, Mus musculus
cggttgggggttttttttttttttagggttgaatcctttattagaaaccatgcaaactttaatacaaaaaatacaagggcaataagaatcttggggtgataaaattcccgggattttctcaacattgcaaccatcccattcatgagcagaccacggtgggatggctgcaccaccatgggtccacctctcccgccacaccagaagactggatggcctcagtctcatgcattttagttttaaattttcacacctgattccccactggtcacaagcggtctggacatttcaggctcccctagatatgaggatttgggtgctatggcctgtaggtacaggccagcgattttgaccttcatttctgtttctccagccctgattttgtatcacacatttaaccaccgcattcccagggaatgagatagatgccaaaaccagcctcttggttagaaaagcagcatacacacaataccaacacaatcagccacactgacccaccctagctgtctgacttcacttctt

SEQ ID NO: 1270 - DNA, 500 bp, Mus musculus
taatatcaagcacaagcctggtggaggagatgtcaagattgaaagtcagaagttgaacttcaaggagaaggcccaagccaaagtgggatcccttgataacgtgggccacttgcctgcaggaggtgccgtgaagactgagggcggtggcagtgaggcccttccgtgtccaggcccccccgctggggaggagccagtcatccctgaggctgcgcctgacgctggcgcccctacttcagccagtggcctcagtggccacaccaccctgtcagggggtggtgaccaaagggagccccagaccttggacagccagatccaggagacaagcatctaatgatgacattctggtctcgtcttccatctcccctgtgttccctctcttgtctcccccccttgttaccctctcccatccctcctcacgtgtcactgcagattgagacctacaggctgacgttccgggcaaatgccagggcccgcaccgaccatggggctgacattgtctc

SEQ ID NO: 1271 - DNA, 520 bp, Mus musculus
gtttggggtttttttttttttttttggtaagagggatgagacactcaggtaatgactttattttttcggttaacataaccagcccacagtacagcatgcgaaatcacaaagtacaaattcaaggaagggaatgcctttactaagtcacaaaatggggcaaattattatagtacccggtaatacaataaaatactatttttgctggaggcatatattaccttactggtaattttcactccaaaaatatcatttaaaagtaccaaatccaaacactggtttccagcagggcaggttattttatataaattaatggcatttaaattttacaggttctctttgtagagggcggccctcatgcaggcagtcctggttcacagcagcgggcagctgtggacaggagggcggctgggctctgctctggttggtccgcagccaggtagtgttccagtacctggagctttaagagactccagatcaacaccaatttcttctaagtacttaaacaacaacaacaacaaca

SEQ ID NO: 1272 - DNA, 651 bp, Mus musculus
gacagacatgtcgatccctctggaaagttgcacagccacagactgctcagcacagagtggggcctgccttccattgtgaagtctcttattggtgcagcaagaacgaaaacgtacgtgcaggagcattctgtagttgacccggtaacgaggacaatggagctcaagtccaccaacatctcatttacaaatatggtctcagtagatgagaggctgacatacaagccacacctacaggacccagagaaaactgtcctgacccaggaagccctcatcacagtgaaaggggtcagcctcagcagctacctggaaggactcatggcaagcaccatatcttccaatgctagcaaaggccgagaagcaatggagtgggtgatacataaactgaacgctgagattgaggaattggcagcatcagcaagaggaagcataaggacaccaatggcggcagcggcagcactggtggacaaatgacaatggaaattggtgtgcagcatcagggctccaggactctcaagctggcatcatattatttgttatttaaaagacacaattattttaggtagatctttttttttaatgaggtggggtaaggctgtgacttttgatctaaacaaaagatccagaacctctaaatcagagggatcatctgag

SEQ ID NO: 1273 - DNA, 582 bp, Mus musculus
gtccaaacagcattaaatttaattgttacctacaattaacaatgggtgaatcggggaacaacatatttgaaaatgcatgatttacagaatgctgccaatgctttgagtaaattagcattatttgtgaaaaatggtattgagggtcaagcatttggaaaggggacaatggggacttggtatcgggttgattatctttagaactaagtatctaatggagtcaaggctcggaataattggaaatgtggttaattactgcactttggggtaagtgcccttcttattcttcttgaggaaacactgccaattataaataatataatcacaggaaagttttcattcggcaactggaaggctggtttgtagcatacacatatcagctgagaaacaacactgagcaacagttctttctttctttctttaaggcagatctgttcagcattgtgttctaactggtgtggtgcagaaggtgattataaactaaccactccaactgtagtgataacaacatacactgctgggaacagtcagaaacagagtctttctagctcttctgtcaccatttaaaaacacaaattcttcata

SEQ ID NO: 1274 - DNA, 606 bp, Mus musculus
  misc_feature (1)..(606): n is a, c, g, or t
gaaaaccaaagaaggcagagagcaactatatntggaaaacaattaaagctttccagtatgtacatgaccattatttagaagatgctgactggtttatgaaagcagatgacgacacatacgtcattgtggacaacctgagatggcttctatcaaagtataaccctgaacaacccatttactttgggcgaagatttaagccctatgtgaagcagggatacatgagcggaggagcgggctatgtcctaagcaaggaagccttgagaagatttgttaatgcatttaaaacagaaaagtgtacacatagttcctccatcgaagacttagctctgggaaggtgcatggaaattataaatgtagaagctggagattccagagataccattgggaaagaaaccttccatccatttgtaccagaacaccacttaatcaaaggttatctaccaaaaacattttggtactggaattacaactattatcctcccatagagggtcctggatgctgttctgatattgcagtttcttttcactatgttgatgggacaactatgtatgaattagaatacctcgtttatcatcttcgntcatatggttatttatatagatatc

SEQ ID NO: 1275 - DNA, 445 bp, Mus musculus
gaggcaaaagtcattttttatatctacaagggaaaaaaggaaggggctacacagagagatgaaatttcacaacagtataaaagcaaagcctgcttattttggtaactgcaaataaaggtgacaacgggaccatgatacttcacccactccaaatgaggactccccttaccatgggggagaccaccctggggaaggccgaggctctgtcctctccaggctcttggctcgggtaccaccctcaacaggcagtcacacagcagagcccaatgcgctatctgttcataattttatgaaggatgtaaatttcatttactagttaaaaaaaaagaatagaaaatctggaccaagtaaattgggaactgaaaaagttagagaagggataccaattacattaacaacactttctttaaaaaataaaatcactttcttttgaaatcaaccaggg

SEQ ID NO: 1276 - DNA, 673 bp, Mus musculus
tgtgctctgagggagggtcgcgccgccagccaccgccggaggagcccctcgggccgttgtaagcatcaataatgtctttcatctttgagtggatctacaatggcttcagcagtgtgctccagttcctaggactctacaagaaatctggaaaacttgtattcttaggattggacaatgcgggcaaaaccactcttcttcacatgctgaaagatgacagactaggccagcacgtaccaacactccatcccacttcagaagaactgacaattgctggaatgactttcaccacttttgatctcggtgggcatgagcaagcacgtcgcgtttggaaaaattatctcccagcgattaatggcatagtttttctggtggactgtgcggatcattctcgtctcatggaatccaaagttgagcttaatgctttaatgactgatgaaacaatatccaacgtgccaattcttatcttgggaaacaaaattgacaggacagatgcaatcagtgaagaaaaactccgtgaaatatttgggctgtacgggcagaccacaggaaaggggaatgtgactctgaaggagctgaacgcccgccccatggaagtattcatgtgcagtgtgctcaagaggcaaggctacggcgagggtttccgctggctttcccagtatattgactgatgttt

SEQ ID NO: 1277 - DNA, 473 bp, Mus musculus
ggtggggggttttttttttttttttttttttttttttttttttttagacgggcaacaatggcttttattaggcacagaattttaaatgatctcttcaatttctccatatacaggcaaaactacgggggccattttttttactggagcttggcggctatctaaagaaggacattttatccccaacctgctttaaccaggaggccagttcatctgccgacccccaaggacatgggggggaatgggatagacagactggcccccggctgcaccttcattcaccaccatccggtacccgggcttcaggcccagatctgcagcacatttcttgccaacaatcattaaatggcctaaaagactttcatcatcatcatctggtacagaaatctgggatatatgcttcttgggtatcaccaaaaagggggttggtgcttgaggggaaatgtcatgaaaagcaagacaccggggataggcga

SEQ ID NO: 1278 - DNA, 478 bp, Mus musculus
  misc_feature (1)..(478): n is a, c, g, or t
cggtgtcttgcttttcatgacatttcccctcaagcaccaacacactttctggtgatacccaagaagcatatatcccagatttctgtagcagatgatgatgatgaaagtcttctaggacatttaatgattgttggcaagaaatgtgctgcagatctgggcctgaagcgcgggtaccggatggtggtgaatgaaggtgcagacgggggacagtctgtctatcacattcacctccatgtccttgggggtcggcagatgaactggcctcctggttaaagcaggttggggataaagtgtccttctctagatagttggcaagctccagtaagataaatggcacacgtagttttgcctgtatatggagaaattgaagagatcatttaaaattctgtgcctaataaaagacattgttgcacgtctaanaaaaaaaaaaaaaaaaaaaaaaaaaaaaaaaaaaaaaaaaaaggggcggccgcctttn

SEQ ID NO: 1279 - DNA, 584 bp, Mus musculus
tcttcatcgggaccatccaagtaatgctgctaaccatcagtgaactgaagcccacataccaggaccgagtggccccgccaggattgacacagattccccagatccagaagactgagatctccttccgtcctaatgaccccaagagctacgaggcctacgtgctaaacatcatcaggttcctggaaaagtacaaggattcagcccagaaggacgacatgattttcgaggactgtggcaatgttcccagtgaacccaaggaacggggcgacatcaatcacgaacgaggagagaggaaggtgtgcaggttcaagcttgactggctggggaactgctccggtctcaatgatgactcttacggctacagagaggggaagccctgcatcattatcaagctcaaccgagtgttgggcttcaaaccgaagcctcccaagaatgaatccttggagacttacccactgatgatgaagtataatccaaatgtcctgcctgttcagtgcactggcaagagagatgaagataaggataaagtcgggaacatagagtactttgggatgggcggatactacggcttccctctgcagtat

SEQ ID NO: 1280 - DNA, 554 bp, Mus musculus
  misc_feature (1)..(554): n is a, c, g, or t
atgtgttcattcttttattgtccgttgtgttaacctgactgacacaagatcaacaagagcactgtactcctggcaattattacatatgctagaacatggatttgcactgtagacaactttttataccagnctatgggggactgcattgctttttataaagttcaaaataaagatttttattttcaaacaagtgactttggttttatttcatacattacactttttcttgcagaaaaaaataaaattgtacaactgcataaatataaaattcttccaccatgaaaatggtcaaaacattcataaggacgcagcaccagcgcatgatgcctccagagaaaggaaagaaggaaaggaaatggacgaataagcaaactacccagcccatcactagccacagtgacaggcagatcccagtctcagacacagctgcagaacacactggaggacacggggagagatggcgagacagcattcagcacggagcacaacacaacccatcaccttgatttttctgtactgtcacttaaaatttaaagggcagttcccccatgaca

SEQ ID NO: 1281 - DNA, 509 bp, Mus musculus
  misc_feature (1)..(509): n is a, c, g, or t
aaaaatttaaattttaaattttattaaaaaaaaaaaaaattttttttttgcnccaaaggggggggaaaattttgtagggggggggacggaaaaatttttttttaaagggagggggggccctaaattaaaaaaaaaaaaaaaatttttaaaagaaaaaaggggtggagaaatacaaaaaaaaaaaaaaaaaataaattccccggaaacaaaaaccggaaacaaattaaaaaaaaatcttaaaaaacaaaatcccccgggggggggggggcccccaaaaaaaaaaaaaaaaaaaaaaaaaaaaaaattctttgggcctgaaacgggggttttaaataatcccccaggccaaaaatgggccaaaaaaaaatggttttggaaaaggaaacccaaaaggggatgctaaaacaaactcgcctatgtgggggcccaggcgccttcggaaggcctccccaaaattcaaaccgggggggggggggggggcaaaaaataaaaaaaaaaaaaaaaaaaaa

SEQ ID NO: 1282 - DNA, 591 bp, Mus musculus
  misc_feature (1)..(591): n is a, c, g, or t
tccgccgggggtcggtgaagtatcccaagatggctgggcgtaaacttgctctaaaaaccattgattgggtatcttttgtggaggtcatgccccaaaaccagaaggcaattggaaatgccctgaagtcctggaatgagaccttccacgccaggttggctagtctgtctgagaaaccacctgcgattgactgggcttactacagggccaatgtggccaagcctggcttggtggatgattttgaaaagaagtataatgccctgaagattcctgtgcctgaggataaatacacagccctggtggaccaggaggagaaggaggatgtgaagagctgtgctgagtttgtgtctggatcccagctcaggatccaggagtatgagaagcagctgaagaaaatgaggaacataattccctttgaccagatgaccattgatgacttgaatgagatcttcccagaaaccaagctggacaaaaagaagtacccgtactggccccaccagcccatcgagaacctgtgaagcagcctgggacggagccccggccgacatgaaataaaacatttaaatagtgnnnaaaaaaaaaaaaaaaaaaaaa

SEQ ID NO: 1283 - DNA, 411 bp, Mus musculus
tttttgggttttttttttttttttaggtctgtaaacatttatttaaaaaatactacagagagatttggattcaaaaaacaggcatatacagaaacaaaatggactggactgagaaaaaaggggaatgctgttgttttttcagagggggcacaggggggaactatttacatggcatttataagagcgcaagtctattttaaaaaagagtggaatatcaaaggggaatacaaaatataggggcacccacggcagcaacagagcaggggccttgtgagcacagtgtcaggggatggcggtgtctggctattcaaggtccttctccaggggggccggccttggtggggtcagtgttcacaggatccatagccagactcgggcattttgtctttgtgggcccccctgcctccccgg

SEQ ID NO: 1284 - DNA, 609 bp, Mus musculus
cccggagaaggtctacgagctcatgcgagcatgttggcagtggaacccctctgaccggcccccctttgctgaaatccaccaagcctttgaaaccatgttccaggaatccagtatctcagatgaggtggagaaggagctggggaaacgaggcacgagaggaggtgctgggagtatgctgcaggccccagagctgcccaccaagaccagaacctgcaggagagcagctgagcagaaagatgcgcctgacacccctgagctgctccacacgaagggcctgggagaaagcgatgcactggacagtgagccagctgtatcgccactgcttcctcggaaagagcgcgggcccccagacggcagcctaaatgaagatgagcgccttctccccagaggcagaaagaccaacctgttcagcgctttgatcaagaagaagaagaaaatggcgccgacgccccctaagcgcagcagttccttccgagagatggatggccagccagaccgcagaggggctagtgaggatgacagcagggaactctgcaatggaccaccagctctcacctcagacgcagcagagcctaccaagtccccaaaggccagcaatggggctggcgt

SEQ ID NO: 1285 - DNA, 503 bp, Mus musculus
ctggttagggggaagggttttattgtagataggagggagagctcagccagagacatctggatgagtccagagcagagagaaagtagtagattaaacatggcctgcagactgactatttctaataggcggctgggggggagtgggagaggaagagaaataaggaccagaagagagggggaaaggagaggaagaaccaagaaggcacattaccaaaaaatggcagggttacctgggaatgagaagctaggggaagggaagccagtgaggtggagaagtctaaggtgaggtcatgttcttcagtatgttaataggaaccacaggggaccattcatcctgagtttcttttggacctgataccaggacttgccttcatctaaattgttacttactctcaaggagggcctccaccagagagctgcagagggcaattgttaacctgtggtggtttgaattggtttggccctcatagactcatgtgtttgaatgcttgcctcataagaaat

SEQ ID NO: 1286 - DNA, 603 bp, Mus musculus
ttcagccacgtctccagtctgagtcactggttcctcttgctgctgctgctgaatctgttcttgccggtaatatttgctatgcctgaatcatactcctacaactgtcccgatggtgaataccagtctaatgatgtctgttgcaagacctgtccctcaggtacatttgtcaaggcgccctgcaaaatcccccatactcaaggacaatgtgagaagtgtcacccaggaacattcacagggaaagataatggcctgcatgattgtgaactttgctccacctgtgataaagaccagaatatggtggctgactgttctgccaccagtgaccggaaatgcgagtgccaaataggtctttactactatgacccaaaatttccggaatcatgccgcccatgtaccaagtgtccccaaggaatccctgtcctccaggaatgcaactccacagctaacactgtgtgcagttcatctgtttcaaatcccagaaactggctgttcctactgatgctaattgtcttctgtatctgaagaagataaaggttctacagatggtgtctgtagcttccttttattgctgtgaagagaaaccatggaggcaactctttcatt

SEQ ID NO: 1287 - DNA, 457 bp, Mus musculus
gtttggggtttttttttttttttttttttttgcaaatcaccttattactttattagaagcatatttacattctttttttggttgcagagaacagtttacaaatatccacggggcttggaaatgcatacacgttttttccatccttcatgggggggaatataagttagttatatttactgggctaaaaacacttctgcctggtcctatacagaaaagattagcacagggcatgaggaatactgggggggcccttggggggggcaggcattgcacttacgctataattatgaggctggaagactaggctagaccccactccaaaaggcacagcagagctaccagggctcagggggtactaagggcagattcaacaaaggactggaacattacgaatgatgtcagggagcggtcaaagactgttatatgaaccacaaaactagcattttgcctaatagcc

SEQ ID NO: 1288 - DNA, 612 bp, Mus musculus
tttcacatagctgactttgctttgtgtatgtcggggtagggagcgtggagaaggatgccagagatgcctgttctgctgattctgacattgtatcccatcttattttcctctccctgtgagacatgcaatacacacacacacacacacacacacacacacacacacacacacacacactgcaaatacataacttggcccccctgacaccacccaggctgcctctgctgtgacctcctaggaccaatgcattggaacctgcttgcttgcctcctgagcctgatccagggccactgagcatgtcaggtggagcagctggtggggccatgctgagtgctggcgccagaacccagagaaggcacaggctgtactgccagcctgcaactcatttggctgcacacaggatcccgtgttcaggggtacacccccctccacacttgacttctgctgcctagcacgtgccaatctcacccttgcccgcttgtctgcaggtacccaggaaggcttttgacttctgccctagtcctgtactggagtcccactgtacatttccactaagctttggacttctctgttcaggaagaactgttccccaccctcaggaacatgctgcgc

SEQ ID NO: 1289 - DNA, 563 bp, Mus musculus
tttcgggtgtttttcttctctttttcctttttgaatttttggaacagggttccctgtgtagtcctgtctgtctgggaattcactatatagaccaagatggcctcaaattcagaaatctgcctgcctctgcctcccatgtgctgggattaaaggcgtgagccaccaccacctagcaagccttcctttctataaatatctcccaggtggtaatgccactcagtgatggtggaccatacttcacaaacattttatatatcttttggtgaatttattcatgtgtaccccatcatgtggtaattaccaacttatactggatttcaatttctgctgatatttaggaatatggctaattttcacaatacacatatacatacatatggtagttttagttttggggttgtttttgtttggggtgtgtgtgtgtgtacgcacaattacatgcaggagctttcagagaccaaaggctcaaatcctattagaactggagttacaagaggttgtgagcatacaatatgggtatagggaagccaactcagtttctcttcaagagcatgaccccttta

SEQ ID NO: 1290 - DNA, 625 bp, Mus musculus
gaaggagaagacaaatctaatttataatgtttaaaaaacaagaaaccaaattaatctcaccagtgcattggttctcaaccttcctaactttgtaaccttttaatacagttcctaatgttgtagtgactcccaaccataaagttatttcattgctacttcataactgcaattttgctactgctataaattgtaatataagtatctgacatgtaagatatctgatatgtgaccttaaaggggtcatgctcttgaagagaaactgagttggcttccctatacccatattgtatgctcacaaactcttgtaactccagttctaataggatttgagcctttggtctctgaaagctcctgcatgtaattgtgcgtacacacacacacaccccaaacaaaaacaaccccaaaactaaaactaccatatgtatgtatatgtgtattgtgaaaattagccatattcctaaatatcagcagaaattgaaatgcagtataagttggtaattaacacatgatggggtacacatgaataaattcaacaaaagatatataaaatgtttgtgaagtatggtacaacatcactgagtggcattaccaactgggagatatttatagaaaggaaggcttgcta

SEQ ID NO: 1291 - DNA, 472 bp, Mus musculus
gttttggggtttttttttttttttttttttttttactgcctggagagcagaggccctttattaggggggagagttgaatgaagacaggggggcaggggggttctgtgatagccactgtaggaactggcaaggtctggtttccacctggcgcagggggagacactggacctgggggtagaacacagcatctgggctggcttggaactgctacagccaggacaggtaggggctccagcattactggagccaaggggggaaagcagctctcaaaagccaagttctctgccaacctggggtagacacccttttgacactgagggttaaagggaccagactgagaagtgaggtatggggctgtcccttcagggggcttcacagcactgccataaaacccaaggatgccacagggtgaggacctggcattctgctgggggtggggacagagtaggggcagccaagggtagggcagggg

SEQ ID NO: 1292 - DNA, 705 bp, Mus musculus
  misc_feature (1)..(705): n is a, c, g, or t
tttctgactggagaaatggccactctctgtctcttcgacatggatgggaccctgactgccccgcggcagaaaattacagaagaaatggatggctttctacaaaaattgaggcagaagaccaaaattggagtggtaggtgggtcagattttgagaaactgcaagagcaactgggaaatgatgtggttgagaaatacgattatgtgtttccagagaatggcttggtagcgtacattgcaaacattaaactccctaagaaaaggggaactttcattgaattccgaaatggcatgttgaatgtgtccccaattggaagaagctgcagccaagaagaacgaattgaattctacgaactcgataaaaaagaacatatacgacaaaagttcgtagcagacctgcggaaggagtttgcagggaaaggcctcacgttctccataggtggccaaatcagcattgacgtctttcctgaagggtgggataagcggtattgcctgagacacctggaacatgctggctataagaccatttatttctttggagacaagactatgccgggtggcaatgaccatgagatcttcacagaccccagaactgtgggctacacagtgacggcccccgaagacacgcgcaggatctgtgaggngctcttcccttgacccgaggagtgccggactgaccaacaacactgaaaggggcatctgatgatg

SEQ ID NO: 1293 - DNA, 472 bp, Mus musculus
gttgggggttttttttttaatatttgggatgttttatttaaatgtcttgggttcccttttaaccaacaccaaaaagagaagttaaaaattttttttctttctttctttcttctcccccaccccaccccgctatttctatacaggagagccactggagggaagggttggcgagtctctgcaattgggtggggagtgtgtgtgtgtgtcctgtccggctggagtgttcttcccagcttggcaaccctgggtagacagccaaccccggaggtggcttcctgggagtctcatcctgagcagacctggtcttccccccagggagggttgggcttgaggactggccgggactatggggcccagtgttccagagggaagggaagggatggaggagagaaggtcagatctggaatgttccatggaggttgcagggtctggagaatatatttggtagaaaaataaggcgctttgggaatct

SEQ ID NO: 1294 - DNA, 618 bp, Mus musculus
ccaagaatgtcatcatgttcctgggagatggtatgggcgtctccacagtaaccgctgcccgaatccttaagggccagctacaccacaacacgggcgaggagacccggctggagatggacaaattcccctttgtggccctctccaagacatataacaccaacgctcaggtccctgacagcgcgggcactgccactgcctacttgtgtggcgtgaaggccaacgagggcacagtgggagtgagcgcagccacagagcgcacgcgatgcaacaccactcagggcaatgaggtcacatccatcctgcgctgggccaaggatgctgggaagtccgtgggcattgtgactaccactcgggtgaaccacgccacacccagtgcagcctacgcacactcggccgatcgggactggtactcggataacgaggtgccaccagaggctctgagccagggctgcaaggacatcgcatatcagctaatgcacaatatcaaggatatcgacgtgatcatgggtggcggccggaaatacatgtacccgaagaacagaactgatgtggaatacgaactggatgagaaggccaggggtacaaggctagatggcctggatctcatcagtatttgga

SEQ ID NO: 1295 - DNA, 486 bp, Mus musculus
gttttagagcgcatcgcctgactggcggggtcgccttcccatccgctgcctcgacgatcttcgcttgcctcctcgctcgctgtcccgttgtcctagctcgccgccgcccgctgagcttggcttttccctcctgcagacatgggtggcatcaagaacaaccccgaatattcttcgtttttcggtgtcatgggcgcctcgtccgccatggtcttcagcgccatgggagccgcctatggcacagccaagagtggcactggcatcgcagccatgtcagtcatgaggccagagctgatcatgaagtccatcatcccagtggttatggctgggatcatcgccatctacggcctggtgggggcagtacttatcgctaactccctgactgatggcatcaccctctacaggagttttcttcgactgggtgctggcctgagtgtggggctgagtggcctggctgctggctttgccattggcatcgtcggagatgct

SEQ ID NO: 1296 - DNA, 640 bp, Mus musculus
gccgccctttttttttttttttcacatccgagaacttttattggacacagctgggagccagctctgaggagcagtagcactctatcctccaccctggctgttcagggcagggggaagggtggctccatccaaggagtctcagcaacaggaaccccacaaggcaacagtctactaatgattactatatagttgggagacaggagctgctccacagacgcatgaataggtcaaatcttttataaataaacatccagtgaagagaaaaatgacaactctagttcattcttatacacaggagcactctagggcgatgggtggggtaaccagaggctgacttcgtcactggtcaggggcctgggtgggagatgagtgggcccgtatgtccacagcacggtgcagtaggggcaaggcgggggcgacagacaatgggcactaggacactgcacatttacaagaccaactactgaggggcagctgcccgtgcatgtgtcaggctgttcgttctggaatgaggaggggtgatctttacatcctatcctgtgactgatggtggaaaaggactactttgtggagaggattagggccacgatgagaccgtagaggccaagcacctccgcaaagatgaggatcaggatcatgc

SEQ ID NO: 1297 - DNA, 610 bp, Mus musculus
caaaatcttcaacttttaaaaccccgcccttttcataatcgatcaagtgtgtgtcagcggctcgatcgtagtagtaagagaaagcgtagaaggcgcttcctcggacttcttctggctggtgaagtttcccctgtactaccctcagcacttccgcatagcagggttcaaagcccatctccccttcttggttaccaccatactggtatttcacacccccaaagatccactctgcttccaaccatcttggtaaacaggcacttcgaaacgtatgtccatcagtcccttttgcttccagggctcccagagttgccagtcttgcagctttcagtccaaatcccaagtaactatgtgtatagagcttaaaagtgctgttaaacatctcaaaggaagtgaggtagcccctaggtgtttgttccagggttttctcaaactggggtagaaacgtgatttgggtggaggcaccccccaggtcaagggtccccacagtctcctggccacgaccatgcagctgacctgttagaaagttcacggtaacccaggctagtatgccttcataggacccatccatgatgctaacgctgccatctgggaccaggaaaggtgaattctt

SEQ ID NO: 1298 - DNA, 524 bp, Mus musculus
  misc_feature (1)..(524): n is a, c, g, or t
cggcgcgcgcgttcttggttgacacaggaatgaagagtgtattggctgaatcttcaagcagaggcgatcattatgaccctgctttttaaattggcctgcgtgacccgcccacttggtgtaaaagaagaaccggccaaagggagggcctgaaggacctccacaggagtgtgagcagcactgcttcagcaacaaagcctcaggtccacatcttgggaagaatatggccacttcctggggggctgtcttcatgctgatcatagcctgcgttggcagcactgtcttctacagagaacagcagacctggtttgaaggtgtcttcttgtcttccatgtgccccattaatgtcagtgccggcaccttttatggaattatgtttgatgcgggcagcactggaactcggattcatgtttacacttttgtgcagaaaacagnaggacagctnccctttctggaaggtgaaatttttgattctgtgaagccgggactttctgcttttgtggatcagnccaaacagggtgctgaga

SEQ ID NO: 1299 - DNA, 803 bp, Mus musculus
agattgtaagaaatgcatgcctttaaaattctgtttacttagcatatgtacaggtaaaagagaaatcaccctcagatcccacccagcagaaaacatgcacaaacccaaggtatctgtgaaagggaggccccagccccaagttagcagtggggatggtgcaatcctgtgagtcacaagccattgcgagagggctggactaaagtttcaacagggccagaacccctgttgctggccctaaaacaagcgtgcaccatagccaaaggtctgtttgatgccctcaaagtagtaccgctgccagccttgccgcgtccgctcttcctcaggagcagggatgccacggccttccatgcacagctctgtctctccattcttgtcaatgaaggtcaaggtgatggtggcaaagtgcccctctggccatgacttaaacctccacttcatagcaatgtgttcctcggggaccaggtcagtaaactccccggtgacgttgccatcgaccatgtgaaacttgccacctctgtcggcttccaaggcagcgggggcatgggtaaaggcctggaccagctcctgcgtggtaaacactctatagagctcctctggggaggtcaggaaggtttctttaagggtgatcttacaagtggggattttgacaccaacaggtttggcctggctttttgaaggagcagacttagccttgcaagtctcagtctttagtgctggctggcccactggatctactgactctccattcactgtgggcaagatcatggcctgagtaaactctgtcttgagggtgctgatgtaaa

SEQ ID NO: 1300 - DNA, 589 bp, Mus musculus
tgggaccgagcggtcctcaggctgtggctgcggctgcttgggagctggtagcggtgcgataagtgagctgatggccaagtggggtgagggagacccacgctggatcgtggaggagcgggcggacgccaccaacgtcaacaactggcactggacagagagagatgcttcaaattggtccacagagaaactgaaaaccctgttcctggccgttcgagtagaaaatgaagagggcaagtgcgaggtgaccgaagtgaacaagcttgatggggaggcatccatcaacaacaggaaaggcaaacttatcttcttctatgagtggaccatcaaactgaactggacaggtacctctaagtcaggagtgcagtacaaaggacatgtggaaatccccaatttgtctgatgaaaatagcgtggatgaagtggagattagtgtgagccttgccaaagatgagcctgacacaaatctcgtggccttaatgaaggaagacggggtgaaacttctgagagaagcagtgggaatttacatcagcaccctcaagacagagtttactcagggcatgatcttgcccacagtgaatggagagtcagta

SEQ ID NO: 1301 - DNA, 626 bp, Mus musculus
gtctcaaaaagctttatttttacttggtccaagacttgacagaggctccagggcggttacaaagctgcctagtggcttgagaggttcattcaggtggaggtcccagggcgggctggtgcagagcagaggggggagccccttggaaggtacagaggcctcctagtcgtgcttgagagtgaggcgctcaaagagatactcgcccagagacccctggggcgcgccagtctgcgctggttgtggccccgccaccctgcggaggttggtcagatggttgcccatcttcttgatgagtttcacctccttatccagatagtggctttccaggaagtcacagagatgagggtccgcgcgggcagaacccagggcatgcagatccaagagggcctgattcaggttcttctccatggccaaggcagcttccatggcctcctgggttttacccattcatcttgagatggcttctgcacatcctggaagagtgcacggcccccgcgatcgttctgaaactcgaggagacgctccgcgccctcgcgcttctcctcggccaattcgcggaagaagtggcctacgccctccagagccacgtcatcccgatcaaaaaagaagcccagagagaggatagtcga

SEQ ID NO: 1302 - DNA, 677 bp, Mus musculus
  misc_feature (1)..(677): n is a, c, g, or t
ctctctgggcttcttttttgatcgggatgacgtggctctggagggcgtaggccacttcttccgcgaattggccgaggagaagcgcgagggcgcggagcgtctcctcgagtttcagaacgatcgcgggggccgtgcactcttccaggatgtgcagaagccatctcaagatgaatggggtaaaacccaggaggccatggaagctgccttggccatggagaagaacctgaatcaggccctcttggatctgcatgccctgggttctgcccgcgcggaccctcatctctgtgacttcctggaaagccactatctggataaggaggtgaaactcatcaagaagatgggcaaccatctgaccaacctccgcagggtggcggggccacaaccagcgcagactggcgcgccccaggggtctctgggcgagtatctctttgagcgcctcactctcaagcacgactaggaggcctctgtaccttccaaggggctcccccctctgctctgcaccagcccgccctgggacctccacctgaatgaacctctcaagccactaggcagctttgtaaccgccctggagcctctgtcaagtcttggaccaagtaaaaataaagctttttgagaccaannaaanaaaaaaanaaaaaaaanaaaaaaaaaaaaaaaaaaaaaaaaagggcggccgc

SEQ ID NO: 1303 - DNA, 384 bp, Mus musculus
agactcaaacaggcttttattattcacgtactcggtagaaaacgggggtttagtaaacagggtggaactgtataggaagacgctgggttggtccgatactatttacacgtggtggcagcgctgttcgtcacatcaggcacagcacgtgcacttgtccgcggcgcctttgcagacacagccctgggcacatttggagcagcccacgggacagcaggagcagcagctcttcttgcaggaggtgcacttgcagttcttgcaggcgcaggagctggtgcaagtgcaggagccgccggtggagcaggagcagttggggtccattccgaaatctggtgaagctggagctacggagtaagtgaggagaaggtactcaggacggatagtcga

SEQ ID NO: 1304 - DNA, 440 bp, Mus musculus
cctgagtaccttctcctcacttactccgtagctccagcttcaccagatctcggaatggaccccaactgctcctgctccaccggcggctcctgcacttgcaccagctcctgcgcctgcaagaactgcaagtgcacctcctgcaagaagagctgctgctcctgctgtcccgtgggctgctccaaatgtgcccagggctgtgtctgcaaaggcgccgcggacaagtgcacgtgctgtgcctgatgtgacgaacagcgctgccaccacgtgtaaatagtatcggaccaacccagcgtcttcctatacagttccaccctgtttactaaacccccgttttctaccgagtacgtgaataataaaagcctgtttgagtctaaaaaaaaaaaaaaaaaaaaaaaaaaaaaaaaaaaaaaaaaaaaaaaaaaaaaaaaggggcggccgcg

SEQ ID NO: 1305 - DNA, 462 bp, Mus musculus
gatttcttggagcttacatttttattaatagtaattcatgtataggacaaatactttatttccatatttttaagaaatataccatttttttgctgtgaactttcccagtaaatttcttttgtacccattagtattagaataatgttatcttgtgcgattgttaaaaccctgttttattcccagtttgtttttcataaaccaaaaatccagggcttttgttaaaaagttaaatatcttctcttattaattctgtatcagaatatttacagttgaggaaaatgattttgcctgaagtgtaaaatgggttaacaatgataaatgatacagttcacttacagtttacaaaataaggtttaccagacggacaataaatacaaccagcacttgggaaaaccctttgaatgaaggcctggggcatcatgtgcatccattgcaagggttttgttaagaaaaggccagatt

SEQ ID NO: 1306 - DNA, 644 bp, Mus musculus
cgcggtgagggaagtggacgcgatggccgggtccgcgtgggtgtccaaggtctctcggctgctgggtgcattccacaacacaaaacaggtgacaagaggttttgctggtggtgttcagacagtaactttaattcctggagatggaattggcccagaaatttcagcctcagtcatgaagatttttgatgctgccaaagcacctattcagtgggaggagcgcaatgtcacagcaattcaaggaccaggaggaaagtggatgatccctccagaagccaaggagtccatggataagaacaagatgggcttgaaaggcccactaaagaccccaatagccgctggccatccatctatgaatctgttgcttcgtaagacatttgacctttatgccaatgtccggccatgtgtctcaattgaaggttataaaaccccttacacggatgtaaatatcgtcaccatccgagagaacacggaaggagaatacagtggaattgagcatgtgatcgttgatggggttgtgcagagcatcaagctcatcaccgaagaagcaagcaagcgcattgcagagtttgccttcgagtacgctcggaacaaccaccggagcaacgtcacagctgtgcacaaagctaacatcatgaggatgtcag

SEQ ID NO: 1307 - DNA, 783 bp, Mus musculus
agaaatgacaccacagggtggactttattttaaagctcacgaggtgttcacaatgatcacatgatccacacgtgtgtctcccgtgtcacacctccacgggacaatgcactgtgtggtgatagttcacagccctgcttcgcatgctgctacggttcactagctctgttgtactcttgacttggtaataatgaaagcaaaatcactctactggacagacttaatttttgaaagcccttatgcaaatcagacttagtctcatttataaacaaccacagccacacacatgcggaaatgaagagcaaaatgcaaaacaaaacaaaacccttggcaagaataactgcttaagattctgatcccagcgtgtgaccaagcagtgtagttcatatcctcagaagacgaccccacctcctcagtgtatgagcagcaatactgtacagagctcagtgtggggcacaactccacaggaccctgacaccaaagtcattctcacttagggtcagagactacacagattcaagcttttccttttttcccctcataatacacaaaatttctagacagtcttaaaaaaaagaaaatataaatagactcagtctgttatacaggatcacatactatggcaaacacatctcatgaagtgggggagggagccagcacagagcctagtccaggtccatgttgacagagcccttctcattagggtggcattcacattctgatgcggacttcagcaccaagattatttttgccttctaaatcttctttcttgtcaatatttggggc

SEQ ID NO: 1308 - DNA, 665 bp, Mus musculus
aacatgagaagttcttgaggcttctaacagagacggaagactggctgtatgaggaaggggaggaccaggctaagcaggcatacattgacaagttggaagagctgatgaaaatgggcactcctgttaaagtcagatttcaagaagctgaggaacgaccgaaagtgttggaggagctggggcagcgcctgcagcactatgccaagattgcagcggacttcagaggcaaggatgagaaatacaaccacattgatgaatcagaaatgaagaaggttgagaagtctgttaatgaggtgatggagtggatgaataatgtcatgaatgctcaggctaaaagaagtcttgatcaagaccctgttgttcgaactcatgaaatcagagcgaaggtcaaggaattgaacaatgtttgtgaacctgttgtaactcagcccaaaccaaaaatcgagtcacctaaactggagagaactccaaatggcccaaatattgacaagaaagaagatttagaaggcaaaaataatcttggtgctgaagctccgcatcagaatggtgaatgccaccctaatgagaagggctctgtcaacatggacctggactaggctctgtgctggctccctcccccacttcatgagatgtgtttgccatagtatgtgatcctgtataacagactg

SEQ ID NO: 1309 - DNA, 190 bp, Mus musculus
tttttaaaagttcactcatcattatattggcttgtcccaatgattcaccccaaatactagcatcgggaggggaacttgagtgttagcactgagtttgtagaaacaatcatcctattaaacatctagcttctctgacctccatggtcaactgtaaagtaaggcttacattcacatgcttatacacaagctt

SEQ ID NO: 1310 - DNA, 648 bp, Mus musculus
cgtgacggacccggaagtgatcatcgtgggatctggtgtgcttggatctgccttggcagcagttctctccagagatggaagaaaggtgacggtcatcgagagagatttaaaagagcccgacaggatagttggggagctgctgcagccaggaggctaccgtgttctccaggagctgggccttggagatacagtagaaggtctcaatgcccatcatatacatggctacatagttcatgactatgaaagcagatctgaagttcaaattccgtacccactgtcagaaaccaaccaagtgcagagtggaattgcttttcaccatggccgattcatcatgagtctccggaaagcagctatggcagagcccaatgtaaagtttatagaaggtgttgtgcttcagttactagaggaagatgatgctgtaatcggcgtgcaatacaaggacaaggagactggggacaccaaggagctccacgccccgctcaccgttgttgcggatggactcttctccaagttcaggaagagcctcatctccagtaaagtctccgtttcttcccacttcgttggcttccttatgaaggatgcaccacagtttaaacccaattttgcggagcttgttctggtcaaccccagtccagttctcatctacca

SEQ ID NO: 1311 - DNA, 822 bp, Mus musculus
aagtttcaatagttttattgggaggtttttgttttctgtgaaatatactagagcttggggaaggggacacattcactttgcaaggtaagggtttcccaccactaaaggaaaaggcatggggcagggtacactggggtttggatccactttcctacctccttctgctttgctcacattactttttctcagtgaacacaacacaaaagaaattcaaaacagatcaacctccagagggggtcacacctaaatcttctcccatcccaggctttgccagcactgggagaggccagggcagctcactctacagccctaggctgcacagaaaggctgagggctcagacaattactccaaagttaataaattagaataaattataaggaggacgaggaggaggaggaatgcaattttgtgctgggagggtcccttctctccaacacctaagagttgggggaggagatgggtatctccaaaggccactacatttgggactaagagcagtgggggtgggggtcagcttttcctccactccttcccaaacagcaaaattgggggtgcacgatgcacacacacatgcacacacatgtacacacgcacacacacgtacgtacacacacgtacacacacgcacgcgcgcgcgcacacacacacacacacacacacacacacacacaaagttctctttccctagaacaaggacagaccaagaaagaggatactatgcaacttccatctcccaaaccatccctaagggtaaggatatggtcagtgaataacatcaataaggtgggtgattggcatgtggtagggggagcagaagatgc

SEQ ID NO: 1312 - DNA, 592 bp, Mus musculus
ccagaccgtgtgcaaaaggctggccaggttattcgcatcatctgtatcctcagccaccccatcaagaataccaatgatgccaattcctgccaaattatcatccctcagaaccaggtcaacaggaagtcagacatctatgtgtgcatgatctcctatgcgcacaacgtggccgcacagggcaaatacatcgccattgccagcaccactgtagagactgcagaaccagaaaaggaagttgagcctgcattggagctgttggaacccattgaccagaagtttgtggctatcagtgatttatatgagcccattgatgatggttcagagagtcaggtgttctgttcctgctcctatgatgctaccacacactttgagacaacctgcaatgacatcaaagatatctacaaacgcatggctggttctgcctttgattttgagaacatgaagcgcaaacagaatgatgtctttggagaagctgatcagtgattgctgactcccctcctccagcccctgttcccctctccccaacttgtatgtccttctctagggcaggggagatggtatggctaggcatccttgtttccagcatcttctg

SEQ ID NO: 1313 - DNA, 492 bp, Mus musculus
gcgtgttttttgttttttaattattgtgtttttgtacaaaagtggtatattatttttcattgaaaacacgggttaggatgcaaacaacaaagaagccttttttaaaaataacattatttttcttgtatagaaagaaacaaaatttccactgccattgcaagggtattgagaagaggaatgacttcattcatttttctctaaagtaacgaatggccctgcctttcccacatctcctgtgttcagattaactgtgttgttacttagtggcctaggcgttcactattatagcgagatcagcttgcatctgggcagatggcctaaacagaaagagagaactaaaatccttttcccatagataagtgggtcagacacttccctgagccagcaggagagacaggtgcagcagtgtccccacccaaagcagagacctgcagagcctccatgtccacttccgcttccatccccttcctttatgattggggaaagtataaa

SEQ ID NO: 1314 - DNA, 192 bp, Mus musculus
tccggcttctggagcggggcgcattgaggcgcctagggaagcgctggcttcagagaggaatcgagggactggggtctgcgcccccgcacccctgatctccggacgcgtcttccaacctcagagacacattcttgggggcttctgagccgcggttgctctgttttcccgtgacacaatgttccccttctctgg

SEQ ID NO: 1315 - DNA, 527 bp, Mus musculus
ctgtatcatcactttattgcttatgttacatattccaattttttttaaaaagtaaggcacatgaaaagccttctgtgcaagttccatattattttaaaattctattgttttttaaaagcattgcaactatagacttagagacatctagaaaagaacatgatagtttgagagcaaaatcctgaagcattattaggtctcatggcacaattagtcagcaaacccaaggtttgtatcacaacagtgtagctagagtcactacagaatcactgaccagcatattcacatatgtacagccaggtccccaagtatgaacgatacagccaacgggaaggacggcatctcactgcagctgtgccctgttctatcacaggtaagggatttggcatcttcagtcttttgcatgccgtgcttgctgttctcaaggcctggttatacaatgctgaagaccatggagagatattgctcataagacacctgaatccagccatcctgatccgtgtcatagcgtctgaatatgtctgtcaacc

SEQ ID NO: 1316 - DNA, 590 bp, Mus musculus
tagcttgtggagctgggccgcgttgccgctgtgcatcagcccatggctgcctactcctaccgcccaggcccgggtggtggccccggccctgctgctggagctgcactgccagaccagagcttcctgtggaacgtcttccagcgggttgataaagacaggagtggagtgatttcagacaatgagcttcagcaagcattatccaatggtacatggactccatttaacccagtgactgtgaggtcaatcatttctatgtttgaccgagaaaacaaggctggtgtgaacttcagtgaattcacgggtgtgtggaagtatatcacagactggcagaatgtcttccggacctacgacagggacaactctgggatgattgacaagaacgagctcaaacaagcactctcaggttttggctaccggctctctgatcagttccatgacatcctcatccgaaaatttgacaggcaaggacggggccagatcgcatttgatgacttcatccagggctgcatcgtcttgcagaggttgacagacatattcagacgctatgacacggatcaggatggctggattcaggtgtcttatgagcaata

SEQ ID NO: 1317 - DNA, 444 bp, Mus musculus
ggttttttgttttttttttttttttttttttttttttttttactgccccagcagcgatttattggcctgctctcctgaggtcacaggtcaggggggccagccagatccctgggctctggcgggtcctcatttttttctgagattgggggggacgcagcaacccaggggagaggcctcgatccccaagccctccatgctgccagacttcagggcggctaggaggagacaccctaactggcagggaaaacagttcagaccataagcacggggtcccgaggcacaggtcccggtcacatgttggctcgttcccgctgcagtcgagagttgtaggcgcgggacacggtattccaggcgtccatgtagcggtccatgcacatggcgatgcatttctgctccgagttatccaaggagcccccgggcttcccgatgcacttccggaaacac

SEQ ID NO: 1318 - DNA, 585 bp, Mus musculus
tggcccggttgactgagcagccatggacagcggcttcggctcggattttggcggcacgggtggcgggaagctggacccgggggccattatggagcaggtgaaagtgcagatcgccgtggccaacgcgcaggagctgctccagagaatgacggacaagtgtttccggaagtgcatcgggaagcccgggggctccttggataactcggagcagaaatgcatcgccatgtgcatggaccgctacatggacgcctggaataccgtgtcccgcgcctacaactctcgactgcagcgggaacgagccaacatgtgaccgggacctgtgcctcgggacaccgtgcttatggtctgaactgttttccctgccagttagggtgtctcctcctagccgccctgaagtctggcagcatggagggcttggggatcgaggcctctcccctgggttgctgcgtccagctcaatctcagaagagagtgaggacccgacagagcacagggatctggctggccccactgacctgtgacctcaggagagcaggccaataaatcgctgctggggcagtaaaaaaaaaaaaaaaaaaaaaaaaaa

SEQ ID NO: 1319 - DNA, 494 bp, Mus musculus
tttttgtgttttttttttttttttttggagctcaacaaagtttattgttttttcctaaaaatgatgcaaggacagaacactcagagtggcccttgtgccttcagagaggacagacacttcaaccaggggctttccctgaggtacggcttctggttttccaagactctgagtggaggctcattccatgcagcccgcccagagggagaacgctgcggcctggacggctgctgttcttttctgtctagctatggtcaacggcctgaggcatggccagcacactgctctggcctgccctccccgtcagtcaagtgtcaaagcagaagcacctgcaaagggaacaagccgtcctcaggacccgggggtcaggagctgcagccctgcacgtcacagggtggagtctgggccatctgtggggaagttagtacaccaagggcgcaagcatgattttggagtggacggcacacgggagctggaggttagctacctcagcctca

SEQ ID NO: 1320 - DNA, 586 bp, Mus musculus
gcttctcacgtggtaattcctggacctgggtctctgtgcacgtgtgcatcctggatgctgtttcttctctgatgtctccccgtctgttgtctgctacgggtgatcaagcgatgctaatgttgtgtggtcagatagaaccccagcccgcagtctctcccacaaagagcccagaggtagtgcttccctggcccacagaagactgtccagctagcagcctggggttccagaacaaattctgaaatgtattccagtttttctttaaagtgcgtgtgcccggttggccacggtggggtgcactgtatcatctctgttctcaggaggctgagacacgaggtctgagccagcctggtagtaatctgcctttgattctgctgctgtggagtcacaatgtcattactgtaaaactgaacactgctgtgaggaactgacaaggagacatgtagtgggacatgccgctgctccagcccacgcccccccccccacacacgcacacacacttacatgtaatgtgtgcaaactttgctttatacttggctaagaagccatcagctttgttctgaaggtgtagctcagtagtagagcactc

SEQ ID NO: 1321 - DNA, 508 bp, Mus musculus
  misc_feature (1)..(508): n is a, c, g, or t
tttacctctanagcgaacccgcgtgtttgtttttaaattaatnannnatcatantttctttatgggctaaaggggccacaaggctgagccaggtggccaaggtcaccagtggtctggtcaccggtacaggtagtcagcctggatgttttcagctttttttgcctcccactgggggggattgctnantaacttctccttggtgtacagcaactcctcgggtgtctcggtggagaactcgaagttggggccctccacaatggcatcaacagggcaggcttcctggcagaaaccacagtagatacacttggtcatgtcgatgtcatagcgtgtcgttcggcggctgccatcggctcttggctcagcctcaacggtgatggcctgtgcaggacagatggcctcacagagtttgcaggcaatgcaacgctcctctccagatgggtagcggcgcagtgcatgctccccacggaagcgcggactcagtgggcccttctcaaaggggtagttgatg

SEQ ID NO: 1322 - DNA, 589 bp, Mus musculus
ttccggttgaaccgcatctgggccagggaaggagccgcagcacttcaagatgtatcgcctgagctcatcaatgctgccacgggccttggcccaggccatgcgcacaggacatcttaatggacaaagccttcatagcagcgcagtggcggcaacgtacaagtatgtgaataagaaggaacaggagtctgaggtggacatgaagtccgcaactgacaatgcagctcggattctgatgtggacagaactcatccgaggactgggcatgaccctaagttacctctttcgagagcctgccaccatcaactacccctttgagaagggcccactgagtccgcgcttccgtggggagcatgcactgcgccgctacccatctggagaggagcgttgcattgcctgcaaactctgtgaggccatctgtcctgcacaggccatcaccgttgaggctgagccaagagccgatggcagccgccgaacgacacgctatgacatcgacatgaccaagtgtatctactgtggtttctgccaggaagcctgccctgttgatgccattgtggagggccccaacttcgagttctccaccgagacacac

SEQ ID NO: 1323 - DNA, 552 bp, Mus musculus
  misc_feature (1)..(552): n is a, c, g, or t
aaattaagacaaagtacggtatttcctcatgaatgcatctgggagatttgtttttaaaggacataaaacaatttccttctaaacttattttgaccatttctaataatatggtttggttaaaaatgctatgggactgaatgacacctcccctagcagaggctatcacaaggaatgaaaaagaagaggagggtaggaaaaaaggttgaccaacagatgaaatgtcccaaagtcccactccctgagcaagtactatgcccgacaggatctatggacttcagctcgcctgagcatcttctctaggacacaatccatgccaagcaccaaagatacaggttccccatcttttaaaaagatgaatcaacatgtctaagaaacattaatattaacaaaagattttctcaaagaatgaccgcatgtaagtcacactaagttccaatgaggagaggaagcccgagtgaacgccaaccatccaaactgatggaaggaagagaaggaagatgtanaacccaggagcctgccttgctgtttttgttttgttttttaaaaaactct

SEQ ID NO: 1324 - DNA, 580 bp, Mus musculus
  misc_feature (1)..(580): n is a, c, g, or t
tgagacagggtttctctgtataaccctgctatcctataacttgatttatagactgagttggctggagatctacctgcctctacctcctgagtgctgggctgaaagtaatgtgctaccacaccaagcttggcaggtccttgtaactcctaaagctgccacctctgttttccagctgttctagcctccttccttgcacagtagtacttaagatcatcctaggcccttacgtctctctgtctgcaatgaagaaagggatgggaatgtccttttgggacacttgatccagttgcctctctggctactacaaaccctagagtgcaggctctgcttcaaagaccggattgggcttttgtacctgtgaaaggatctgtcccagatgctgacatgcagaccccacatctggtaagagtcagactgttagatgagaagcgcaagcatatggtgccgtcaagagactgtggtaaggtagccaatgtgtctctacccagttgtgtgctttcagcaatgccttacttagctgaaggcatttagatcctgngactgtagcctgtaccaggctaggctcaggccactgctagct

SEQ ID NO: 1325 - DNA, 581 bp, Mus musculus
atcgagagcctccacctgttacccaacccgaaaacaaaccagaaagtaagccaggcccagccggaccagacctccctcctggacacatccccatccaagtgatccgaagggaggcagactctaagcctgtttcccagaagtcacctcctcctgctgaaaaggtagaagtaaaggtctcctctgctccaattccttgtccttctcccagccccgctccttcggctgtcccttctccccccaagaatgtggctgcagaacagaaggcggcccccagccctgcccctgcagaacctgcagcccccaaatcgggagaagccgaaacaccccctaagcatccaggtgtgctgaaagtggaagccatcctggagaaggtacaagggctggagcaggctgtagacagctttgaaggcaagaagactgataaaaaatacctgatgatcgaagagtatttgaccaaagagctgctggccctggattccgtagaccctgaaggacgagctgatgtgcggcaggccaggagagatggcgtcaggaaggttcagaccatcttggaaaaacttgagcagaaagcaattgatgtc

SEQ ID NO: 1326 - DNA, 111 bp, Mus musculus
tgtttgtgggtttttttttttttttttttttttttttttttttttttttttttttttttttttttttttttggggggtaaaaaaaaaacttaatttcccaccccccccaaa

SEQ ID NO: 1327 - DNA, 554 bp, Mus musculus
atggttataccactttattgatacatattctgcaatttaaatttaaaactttcttaacaactagacatatctgttggctctttttactaatagatttacgttagatttaatcatatattcaaagggcaaagactagaagaagattccaaaagatggatcatgtaatatctcaaaattcagagtagcagacatcatcataaagaagcagacattttaggaaattgactagaaaatcaactgtttctaggtcaatacgcaggcagaaggaaaacatataaagagcaaaaaattgagtttctttatcagctgacttcagggagtccaaatctgaccaggtcgggtaggcttcattttctttgattgcaggattaaccttagatattattcttatgatggactctagaaggtctttgttttttgcctcaatggcttcggcctttgataggatcctataagggcattctggcaaagcactgagttctgtcactagatgtttcagaggctctttccaggctagcagcatatggagcaccattttcaaaaactcttcaaac

SEQ ID NO: 1328 - DNA, 584 bp, Mus musculus
tccagtgaagcatctccccggaatccacagctaagcctggctaggactctgcagagatgctcccttctttgatccaaccgtgctcctcagggactctcctgatgctgttgatgtcaaatctcttcctgtgggagaaggtgtcctctgcacccataaatgccagtgaggctgttctcagtgatctgaaggacttgtttgataatgccactgtactttctggagagatgtctaagcttggtgtaatcatgcgcaaagaatttttcatgaactcattctcttcagagacgttcaataagattatattagatttgcacaagagtacggagaatataaccaaggctttcaacagctgccacactgttcccatcaacgttcctgaaacagttgaggatgtccgaaagacatcgtttgaagagtttttgaaaatggtgctccatatgctgctagcctggaaagagcctctgaaacatctagtgacagaactcagtgctttgccagaatgcccttataggatcctatcaaaggccgaagccattgaggcaaaaaacaaagaccttctagagtacatcataagaataatatct

SEQ ID NO: 1329 - DNA, 594 bp, Mus musculus
gtttctttcacattttcagaggtaactgatttatctattatgttcagtcttgcaaatgtctgtttgaaaaacaaatagttcccaagtgccccacaaaaatggtcctgattgatacaaataattggaacattaatcttttatgtttttaaatggaagtatttcctgcaaaatggttactcaacaaaccactaagttacaagtggtctgactacaaatgctgagttgtttcctaagtacccatccatccacggtatggagttctggccttccattcccaacagagtacatgcagtagtcctgtttacagtttactggagatgagggaaggggtagtcaccttacatacaagtttacagtatggatcatgttacaatgtgtatcttacaatgtatatcatatgcactacattcaccacttcagataaaggtaagggagctagctccttcaaacactggaacaaaggaatgtttgttttataagacctaccaaagaaacagcaaaatgaacaagaacacacataggcactagtctcaaagctgcacaatatggaagctaagggttggagatgagaaattcaggaaaatatacacgtat

SEQ ID NO: 1330 - DNA, 587 bp, Mus musculus
tgatttcccagtctctatccaagtactccaacagtgacgtcatcatctatgtcggctgcggtgagagaggcaacgagatgtcagaagttctccgcgacttccctgagctcaccatggaggttgatgggaaagcagagtccatcatgaagaggacagcgctggtagccaacacctccaacatgcctgtggctgcgagagaggcctccatctacactggaattacactatcagaatatttccgtgacatgggctaccacgtcagtatgatggccgactctacctctagatgggctgaggccctcagagaaatctctggtcgcttagctgagatgcctgcagatagtggataccctgcataccttggtgcccggctggcttctttctatgagcgagcaggcagagtgaaatgtctcggaaaccctgagagagaagggagtgtcagcattgtaggagcagtttctccacctggtggtgatttttctgatccagtcacttctgcaacgctgggtattgttcaggtgttctggggcttggataagaagttagctcagcgcaagcacttcccctctgtcaactggctcatcagc

SEQ ID NO: 1331 - DNA, 525 bp, Mus musculus
ggagtgaaaatctactttaataaccaacatcagcgaaactgagatcctcccctctcaattgaaggggtggaagacaactcttggcgagaggcctcagtccactaagaggttccggcttacagaagggaacagctcaaagaagcccttgaaaagggtgagggtctggagaactccagtggtacaggctgtctcccggatagagtgcatagccagttgggggctgcctaagtccagcacccgaagccccagtcgagaagccaagataggtccaatggtggtaccacacggggagtcattcctgaccatgaggtcctgcaggggcaccccaacttggccagccacctctcgaatcatggactcagacactgcattagaggcgtagcgctgcttgctgttcaccttgatcacaggacccttatggaacaaaggccggtggttttcttcatgcttgtccgagtagtttgggtgcacagcatgggccatgtctgcactgatcatgaaggacttaggtatgacttcctcgaa

SEQ ID NO: 1332 - DNA, 597 bp, Mus musculus
tcgagctaggaatccacatctgtcgccagtgaagtcctcggaagcagagatggctatgaacggcagggctcggaaagaggccatccaggccacagcccgagagctcctgaagttcgtgaaccggagtccctctcctttccacgtcgtggctgagtgccgcagccgcctcctccaggctggcttccgtgaactcaaggaaacagagggctgggatatcgtaccagaaaacaagtacttcttaaccagaaactcctcctccatcattgcttttgctgtggggggccagtatgttcctggcaatggcttcagcctcattggggcccacacggacagtccctgtctcagggtgaaacgcaaatcgcgccgaagccaggtgggctaccaccaggtcggtgttgagacctacggcggtgggatctggagcacatggttcgaccgggacctgaccttggctggacgcgtcattatcaagtgccctacctcaggccggctggagcagaggctcgtccatatagaacggcccatcctgcgcatcccacatctggccatccatctgcagcgaaatatcaatgagaactttgggcccaacacagagat

SEQ ID NO: 1333 - DNA, 527 bp, Mus musculus
gtgttttgtttttttttttttttttttttttttaaccttaagctttatttaaataacctcagggagaacccagcagaccagcaaccatcttctcatccaccccctcacctcacaaggaggggcagaccgcctcgcctttcaggggaagcgggcttggcctctgccacggccagctgatggggctggaggatccacaggggagcgggggttcttgatagtctcatccacggacacaataaggcatgcagcctcagaagctgctgtcagagcgttgatgcgcaccatggctggctcccacacaaatgcctggaagttgtcggcgatgttctcattggtgatggccaccccataccacatacctccctgtgcgtgtcgagcccgcagcttgttgaggatgtttgtggcatcaaagccagcgttgtcacatagctgtcggggaataatctccagggccttggcatatgccccaatcaacagctgctgcttcccaggaatggtcctcgagtaatcccgcaggtatttggaaa

SEQ ID NO: 1334 - DNA, 585 bp, Mus musculus
ccgcttccaagatgatgcccacaccagttatcctgttgaaagagggtactgatagctcccagggcatccctcagctcgtgagtaacatcagtgcctgccaagtgattgctgaggctgtaagaaccaccctgggtccccgtggcatggacaaacttattgtggatggccgaggcaaagcaacaatatctaatgatggggccacaattctgaaactcctcgatgttgtccatcctgcagcaaagactttagtggacatagccaagtcccaggatgctgaggttggtgatggcaccacctcagtgaccctgctggctgcggagtttctgaagcaggtgaagccctacgtggaagaaggtttacaccctcagatcatcatccgagctttccgcacagccacccaattggctgttaacaaaatcaaagagatagctgtgactgtgaagaagcaagataaagtagagcagaggaagatgctggagaagtgtgcgatgacagccctgagctccaagctgatctcccagcagaaggtcttcttcgccaagatggtggttgatgccgtgatgatgcttgacgagctgctgcagc

SEQ ID NO: 1335 - DNA, 451 bp, Mus musculus
gagaatccagctttgacctttattcaagagaccagatgggttgccccaggatctggctgccagccatgcaaggctggagacccacaatctggtctgccattgccctgagctgcagccttggccccaggattccacttgcagccaccacaggtgctggtgggagggagccctgggagattagatgctgctattgattctttaaaaaataaaggaaagacacttaacgctgtgtgttccccgtgacgggtgggcctgagaggccagtgtgacccatggcagcatgatttctgtacaaacgatctggggcagaagggcagcacatggaggctatttcttggctttggcagaattgcggggtggagtgatgggccggcctccggggttcaggccgctgaactgcccatacttgcccttattcttatcagcgggcttgaggatctggaaggaacac

SEQ ID NO: 1336 - DNA, 582 bp, Mus musculus
gtagatcggggcaagcagtctttggagaccatctgcctgttgctggcctataagatcagatacccggagaatttctttctacttcgtgggaaccatgagtgtgccagcatcaaccgcatttatggcttctatgatgaatgcaagagaagatacaacatcaaactgtggaagacgttcactgactgcttcaactgcctgcccattgcagccattgtggatgagaagatcttctgctgccacgggggcctgtctccagacttgcaatccatggagcagattaggcgtattatgcggcccacagacgtgcctgaccagggcctactgtgtgatctcctgtggtctgaccctgacaaggatgttcaaggctggggcgagaatgaccgtggtgtctcctttacctttggggctgaggtggtagccaagttcctgcacaagcatgatttggacctcatctgcagagcacatcaggttgtagaagatggctatgagttctttgccaagagacagttggtgacactcttctcagctcccaactactgtggagagtttgacaatgctggtgccatgatgagtgtggatgag

SEQ ID NO: 1337 - DNA, 518 bp, Mus musculus
actaggttatttttttatttttgtcaagaagaaacgtgtgatataaattcaagattttattaaaatcatttggaagttaaatgaacataatagcttggctgtgaaggaagatttttaataaggcacaataatgagttatatgaataaacagaaagaatgaaaagtgttaactgtgacatttaagcggttacatgattttaattattttttgataataagcagccttgtgacgtttattcaagggactgaaacctgtgcctaccatggaatttgcaggagaatgagagctttgttttctgcctttggcaattttaaggaaacaaatgagaaggaatgtaagactttataaaaacggcaccacctaccacaagtatttcaaaggtgcaaaagtcaggctgcgttcaagcaccgggaggagaaagggaaaaggattttctttaaacaagaaaagtaggcaccagcacgctgtattcatttgcaggacagagcaagaaggccggaggaaggaggccagaaac

SEQ ID NO: 1338 - DNA, 598 bp, Mus musculus
acacccaccaggtgttgctcgctgcgaacatgtccaagtcactgaagaagctggtggaggagagcagggagaagaaccagccggaagtggacatgagtgacaggggtatctccagtatgttggatgtcaacggcttgttctctctagcccacatcacacaactggtgctcagccacaacaagctaacaactgtgccaccaaatgtagcggaactgaagaacttggaggtactaaacttcttcaacaatcagatcgaggaactgcctacccagatcagcagcctccagaaactcaaacacctgaaccttggcatgaataggttgaacacgctgcctcgaggattcggctccctcccggctctggaggtcctggacttaacttacaacaacctgaatgaacattctcttccgggaaacttcttctacctcaccaccctgcgtgcactctatctaagcgacaacgattttgaaatcctgcctccagatattgggaagctcacaaagttgcagatactcagcctcagggataatgacctgatctcactgcctaaggaaatcggggagctgacccagctgaaggagctccacattcaggggaa

SEQ ID NO: 1339 - DNA, 690 bp, Mus musculus
gccattctccatgtttattgtgattccaatgccacgcaggacacaaacaccattggctaggataagagacaacagcagtctggctaagggcagatagtgtttatatgtgcatctatatataacttattccctatgtacacagagagtagacattacacaggagggatcaggaaggaacattgctgggatctgagctgcggtcagttttctctgccactgacattgagaaggctgagatgaagctctgagaagatgcagcctcagagccattacggcatgcagagtcacctcggagtccttggttcacactcctccatgtttggcactctcagaccctggcacctggcctgaacgcttcatggctcccagtcactggcctgtctctgaaaagagtggggaggttggaggccaggcctctctccctaccgtgcctccctttttcacggtcagcatccaaacagtgggttctgcctcccctagggcaccagaccctcagctccattgtccccacaggagctcgctgggacaccagaccggagtcattgctgaagcccggttgaaggatctgacactcagctcgagtgcctagccacaggtccatgtaggcctgggtcaggttgaagtagccagtggtgaggaagaccttagctccgcctcagcctccgtcagcagcgtctccgtgactatctc

SEQ ID NO: 1340 - DNA, 201 bp, Mus musculus
cagcgcccgacacctggatttacccactgatccagatgaagccctttgagattcagattgatgagatagtcacggagacgctgctgacggaggctgagcgcggagctaaggtcttcctcaccactggctacttaatctgacccaggcctacatggacctggtgctaggcactcgagctgagtgtgacatccttcaaccggg

SEQ ID NO: 1341 - DNA, 717 bp, Mus musculus
  misc_feature (1)..(717): n is a, c, g, or t
ccaagaaatatcacttttatatattttgaagtacatgaaaaccaggactgtggaaacgggttattgatattttctaagtaaaatgactgattaaggataatgagtttttagtagaactcatgatattatctctttggcaggcaggctggtgccactcacacgtttccccttctttcccataccgggtctttacaggcgcttcttaccgatcgttcctgataaggtccacgtacaccaaaggccacagaaaaacttaagcaataatggtaaatgctatactaagagtgtaaacaaaaggatgccttagagttgcagggcttcagaaaatctgtgatcaggaccaaagaccatcactctgcaaagatggtccccttcagcttggaagttcagagtttggtctcaggtcagcagccagaagctggtgtgcacgcgctccacagggccttctgagtggctgcaggtgctgtgtgtaccgggcacattgcttacagtggctatggagaaggctctgggagaatcccnanngggacaggcccgagcagtcagacatttacattcctttcatctacctgtcggagaggaaactgcctctacaagatgtcataaatacaaatttgaataggaaagtagtgtaaaaattagcggtagtgtttggaaccttgggtccagttctttctgtaagtatgtccggacgctcaggtgagaccagaaacatac

SEQ ID NO: 1342 - DNA, 312 bp, Mus musculus
agggcttgtgtgcttgtgttttctaccacagacagggaatcttttgaagcgatttccagctggagagaaaaagtagtagcggaggttggaggtatgccaaccgcactggtgcaaaacaagatcgatctgctggatgatctatgcatcaaaaatgaggaagcggagggactggccaaaaggctaaagctgaggttctaccggacgtccgtgaaggaggacctcaacgtgagtgaagtttttaaatatttggctgagaaacacctacaaaaactcaaacaacaaataaccgaagatccataacagacacactca

SEQ ID NO: 1343 - DNA, 738 bp, Mus musculus
aaatgtataactttaaatttgtatttcaggatctaggagcttccgggaccataactttaacccagccttccataactgtcttcttactttctattacacaacaggacactgcaacaacagcaacagactgcttcagacttttcacttctgcagatgctaagaccacctctccaacatatagaggagcaggaaatttaatttcctgggaaagaaacacacagcctggccctggcattttggtgcccaggagagctgaaataagtccatttatcaaaactccgtgaacaattgtctttccaaacttggagtgttttgcaaaatcttcacttaaatgcaaaggattggcatctcccgttaactctgagaaggtagctacatcctgctgtgtgaaggctctgctgagctccgctcggtctccaactttcgtgtgcacatactgaaaacactgccctgttggtaccacatgatgttgccacagtctcctctgaagcccacgccacatcttcagtatctccaaatgtcaccaacaggggctttagcttcgtctgttttcaaataatgtagacacctaaggacactgtggagagtggaagtatctggacctgtaagagtattcagtccaatacttgttccctgctattgccagataatgcaggagaaagggggacactgaatcactctgaagcacacttcttgcttttataggctcaaacaaggtcaaagactccataatttgac

SEQ ID NO: 1344 - DNA, 557 bp, Mus musculus
  misc_feature (1)..(557): n is a, c, g, or t
agagtatcactacatgaaagtctgtctagagtttcaagaacatggggttggactgaacgtggcacagttcaaacagctgctcgtctcagccctgagagacctgtttggggaggtcggtgccgctctgcctgtggcctgnttcacctacgatgagaagacactgtcggccatcttgagaatatgcagcagtggtctggtcaaattatggagttctttgaccttgtttggagcctataaaagcaagaagtgtgccttcagagtgattcaggtgtccccctttctccttgcattatctggcaatagcagggaacaagtattggactgaatactcttacaggtccagatacttccactctccacagtgtccttaggtgtctacattatttgaaaacagacgaaggctaaagcccctgttggtgacatttggagatactgaagatgtggcgtgggcttcagaggagactgtggcaacatcatgtggtaccaacagggcagtgttttcagtatgtgcacacgaaagttggagaccgagcggagctcagcagagccttcacaca

SEQ ID NO: 1345 - DNA, 720 bp, Mus musculus
actgagaacaggcccatcgaggctttattgaaaatcttgatttcaagtgaaattgcatgtgggataaaaatgcagtccagccctgccagcaactaactcgctttccgtgtttgcttgagcctccagcacccgtcagataccgaagtcggatgaaaagcaggtctttgcccatttgtagccagctccagaatggaactaacttagaaccctcaatttctgtccagttgacagcaacttctgctattgggatttgaagacactgtgctatgtaagcagctctacatcaaatgcccatcgttcaatgtgcagagacgagaaggtccgggctgctgcttctcgggtcagtaatttgaacccgcactgtgtgtccctgattcctttgacacagaggaaccacaccaggaaatggaatccgtacataagaaaggtacggaagtaggagcgctgagcaatcgattctttctccagatgagctcgagacccacatgcaatagccatttgctcaggccatggctgtagatcactcagccccttttctaatttctcaacatctggaaactttgtggctccgtcagcatctgccatgaggatcttctctcctcgggaactgaatacacccatcctaacagcaccacctttcccacggttccgcaccagggttatcacccggactttgcacttccgtatttctggcagtattttaaagcgacctttgacgtc

SEQ ID NO: 1346 - DNA, 379 bp, Mus musculus
gaaacagctatctgttgttgtgccttcctacaatgaagagaaacggttgcctgtgatgatggatgaagccctgaactacctagaaaagagacagaaacatgattgtacgttcacgtatgaggtgatagtggttgattttggcagtgaagaccagacgtcaaaggtcgctttaaaatactgccagaaatacggaagtgacaaagtccgggtgataacgctggtgcggaaccgtgggaaaggtggtgctgttaggatgggtgtattcagttcccgaggagagaagatcctcatggcagatgctgacggagccacaaagtttccagatgttgagaaattagaaaaggggctgagtgatctacagccatggcctgagcaaatg

SEQ ID NO: 1347 - DNA, 407 bp, Mus musculus
aaaaaggcacacgttaataaaccacccaaaaaaaaaaggaggatccccgaggaaagctgcggcacacacccgcggcccccgccccaaccctgggcgcccaccggccccagggacaccccaaaagcccaccacctgggccccaccggaaccttgaaagaggaaaaagggggctgccccactgaaccgcccccgaaaaggaccaatgacaagaggggcaacaaaggcccccagcaatgtaacggggcagcaccaaagccaccacctgccatgcgactgccaaaaaccccaggcacaaaaagcgcggcctcaaccaattgatccagcacagggcagctgaccccaaagccacccctgagtgagaagggactccccaccatgagacccccaaaggccttgaaacccccccg

SEQ ID NO: 1348 - DNA, 179 bp, Mus musculus
gagccccaaagactgcagcgcccactgccctcagcccagtggtccttggagcctggaatcccacagtgggccaattatgtcaagggagtgattcaacattacccagcttccccgctcggtggcttcagtgcatcggtgggcagctcagtgcccctggggggtgggctttccagctcagc

SEQ ID NO: 1349 - DNA, 712 bp, Mus musculus
agattcatttttattttgcatgtatgacttttttccccacatgtagatccacataccacatacatgtgtacccgcaggccagaaagggcatttggatcacctgggaaatggaggaccagctcatagttagccaccaggtgggtgctaggaattgaatctggaacctccagtagaacagtcagtgctcttaaattgtgagccagccttcactccagcctctcaccagtagctcttaatttagtgagaatgttcacacagcaggctttcaagagttcacaaagccaaggccaaaaaactaacaaattatcttggacacctctcagcaggacatattactgagcctaaggcactgtaagttattatccccacggaagaaaagctttgatgtcacttctaaagtccccttgtatcagttcacaaaatcccaaatagaaacactagtgtcaggaagtgtctggggaccctttgagtctgcagtgaggtagttgtaactttagaacgtgaacggtctgcttccgaaacactgggttctcggccctgaaccgtgacgtccggtttcgttggcaatcctccagtatctctctcgcaaaataaaggccgaagttttgggctgtctctggcgagtgaagatccccttcttgtttccgattactctcagcggtgactggttcgtcatgaagtcggcgaaattccagatgagctctccgaccac

SEQ ID NO: 1350 - DNA, 563 bp, Mus musculus
aatggagtgcgtgttgggtcgcgctgggccagctgctgtgcagctgcgcgctggctctgaagggcgggatgctgttcccgaaggagagcccgtcgcgggagctcaaggcgctggacggactgtggcacttccgcgtcgatctctcgaacaaccggctgcagggtttcgagcagcaatggtaccggcagccgctacgggagtcgggcccagtcttggacatgcctgtcccttctagcttcaatgacatcacccaagaagcagcccttcgggactttattggctgggtgtgggatgaacgggaagcaatcctgccacggcgatggacccaagataccgacatgagagtggtgttgaggatcaacagtgcccattattatgcagttgtgtgggtgaatgggattcatgtggtggaacatgagggaggtcacctcccctttgaggctgacattagcaagctggtccagagtgggcccctgaccacctgccggatcacgattgccatcaacaacacactgacccctcatacccttccgccggggaccatcgtctacaagactgacacc

SEQ ID NO: 1351 - DNA, 658 bp, Mus musculus
  misc_feature (1)..(658): n is a, c, g, or t
ctgtatattttttattatgtaaaaaagagctttccaaaagctgtatttggcatgagcgaatgccactgctaatgctgccagtggtccaggcagagctggtcctcctggaggagctgcagagagaggaagggatacagagcccagggtgccggtcccttcaccccgaacctgcagctccaggctctcagcgtgtggcttcctgatgagaaaagaggcactctccccccagacaggggccgaagattgggagacagtcttggttttatgggaagtctctcccacggtgatagtagcgtaagggctgggaggcttggtaccttttcggagcggcagatcttctccgcagnngnnaagacggacagcagggctctgccaagctctgaactcttctgagtctggatcaggctgttcacctgcagcacctcctctaactcagcagcagtcggtctaggggtcagacgctccaggcgcaagtgcaggcgcccggatgggacatctccgagggtcagccactcatcaagaaagccactgttgagcactgtggtgagactcactttatacctgcccaaaaagtcatccttgtccaagtccttatcaaagacctcaatctcaagctcttggccagggattgatgtgacaacacctcaaaaacctcatt

SEQ ID NO: 1352 - DNA, 217 bp, Mus musculus
ctcttccttcttcccactcctcagggcctcacgcagctctgcctggaccactggtttgcactcagtggtcagggccaggtgctgatgagagcgcagcttgggatcctggtatctttttactcgggagtggaagcccacagccacagctacagccacagtcacagctcctcctcgctcaatgacgaacctgaggccttagggggacccactcaccctg

SEQ ID NO: 1353 - DNA, 757 bp, Mus musculus
ggctttgctttgctttgttgattattaggcaataccagaccacatcctgttcctctcattgaattccattcctagatgttggttgggcttactttgattgattctggagtcactgtcccagtctgtcaccacaaaggtcacctctcctgttacaacggcctttactgtttgaaaatccttgagcacagagcaatgctgtcagagcagttattactggccccattccacagacttgtactccaaggtcacttatcagcacttgcccaacatcacccaggtaataagatgctgaaccctaactcaagttcagatccaccagctcctggaatgccaggatgctattacatcatcccttctctgccccttccgccattcttacaactaagctcctgtttgtgtccagggagttgttgggttctgttcttgtaccttcatgttcttgttgactatctttgccaagtgtttattatgtctgctgcaggtgcttacgtgcctacagaagtaatagacaagatggccatctgagagtctgaactctctccaaatcctaaacagggtcctgccaaccgaaggcctgagcctgggactaaagataggcacaagtgacatgaatccttgtggacttcgagtgcctggcagagcctctgtggagggtgactgggagaacaaggaccacaggagcagcagctgccattccttgagcacctactgagtgagaggctctatgctagttctttattaacatcatttaatcctt

SEQ ID NO: 1354 - DNA, 174 bp, Mus musculus
cctcttcaagagctttccagggcccatggactgggttccgcgctacacaggtgtggcccctcgagaccaatgcaaactcacctgccaggcccgggcactgggctactactacgtattggagccccgggtggtagatggtactccctgctccccagacacctcctctgtctgtgt

SEQ ID NO: 1355 - DNA, 782 bp, Mus musculus
  misc_feature (1)..(782): n is a, c, g, or t
catgaaaacttcaagattttactaataaagttaaaaatcctagctgttgcgntactggttgactttggtctgtattttctggacttctgcaggccacggataacaatcaggtaggatctggtcataattagtgctgtacatctgggaggagacaaattcttctttgttttggggttcaggataaacagtggccatcttttctttgtatgcatcttgcacaatctttactgcaattttcaacgaaacgcctcgaatggtattcaaaggaggatagagccggccttcttgcaggtgtttatctgacacttgctgagatatgacctcagcagtggtgaggaagaccttatcatcgatgtgtctcagtccgcagccaccaccccaagagcaactccagggaacacgtagaattgttgccttggccaggaaacagagtccgtccatctgggagagtgactggatcaaaaggactgccgctggcaaagattgcacgtcccttggtcaccttgtagcactgctctgcagcactgccgctttgctggtcggattactcaaagcaaagatgatgggccgctcgttgaaggcagccatatccttgagaatttgttcagtgaaagcaccaccaattgcagcaactcctatgagggcagttggttttatcttttgaacaatggcttcagattcttcatttcttcatgttcatgggcaaacacctctttctcttctgtgagagatgcacgacccttaactattagtccttttgagtcaacaagcatatcttcttt

SEQ ID NO: 1356 - DNA, 441 bp, Mus musculus
aaagaagattggttggttgactcaaaaggactaatagttaagggtcgtgcatctctcacagaagagaaagaggtgtttgcccatgaacatgaagaaatgaagaatctggaagccattgttcaaaagataaaaccaattgccctcataggagttgctgcaattggtggtgctttcactgaacaaattctcaaggatatggctgccttcaacgagcggcccatcatctttgcgtttgagtaatccgaccagcaaagcggagtgctctgcagagcagtgctacaaggtgaccaagggacgtgcaatctttgccagcggcagtccttttgatccagtcactctcccagatggacggactctgttttctggccaaggcaacaattcctacgtgttccctggagttgctcttggggtggtggcctgcggactgaggcacatcgatga

SEQ ID NO: 1357 - DNA, 693 bp, Mus musculus
cagtttttaaatcttttatttttgtgcggtggcaacaagttacaaaagcacaggaagttctttcactcagagccctggggctaatttgtatgtcatgtagcggggagtagcgctgaatttggcgtaagacttgatgaccttatttacagcttctaagaagtccttctctgtagcaatttttctccgtgctcggattgcaaacataccagcttctgtgcaaacacttctaatctccgctccagtactgtttggacacaggcgggccaacagctcaaatcgaatgtctctttccacactcattgagcgagcgtgaatcttaaagatgtgcgttcgaccctctaagtcaggtaagctgaactcaatcttcctgtccagcctccccggtctcatgagcgctgggtccagagtgtcagggcggttagtggccatgagcaccttgatgttgccgcgaggatcaaagccatccagctgattgatgagctccagcatggttctctgcacttcattgtcacccccagcgccatcgtcaaaccgagcccctccaatggcatcaatttcatcaaagaaaataaggcaggctttttttgtcctggccatttcaaaaagctcacgaaccattcgagctccctcgccgacgtatttctgtacgagctcagacccaataactcgaatgaagcaagcatcagtccgatt

SEQ ID NO: 1358 - DNA, 337 bp, Mus musculus
acagttaccatgatgcaggtggaggaaaaacccgacgtcacatacagtgatgttggtggctgtaaggaacagattgagaaattgcgagaagtagttgaaacccctctgctccatccagagaggtttgttaacctttgatgttagcctccaaagggtgtactgctgtttgggccaccaggcacaggcaagacactctgtgctagggcagttgccaatcggactgatgcttgcttcattcgagttattgggtctgagctcgtacagaaatacgtccgcgagggagctcgaatggttcgcgagctttttgaaatggccaggacaaaaaaagcctgcctta

SEQ ID NO: 1359 - DNA, 313 bp, Mus musculus
  misc_feature (1)..(313): n is a, c, g, or t
acagttaccatgatgcaggtggaggaaaaacccgacgtcacatacagtgatgttggtggctgtaaggaacagattgagaaattgcgagaagtagttgaaacccctctgctccatccagagaggtttgttaaccttggtantgagcctccaaagggtgtactgctgtttgggccaccaggcacaggcaagacactctgtgctagggcagttgccaatcggactgatgcttgcttcattcgagttattgggtctgagctcgtacagaaatacgtctggcgagggagctcgaatggttctcgagctttttgaaatg

SEQ ID NO: 1360 - DNA, 728 bp, Mus musculus
  misc_feature (1)..(728): n is a, c, g, or t
cagtttttaaatcttttatttttgtgcggtggcaacaagttacaaaagcacaggaagttctttcactcagagccctggggcananttgtatgtcatgtagcggggagtagcgctgaatttggcgtaagacttgatgaccttatttacagcttctaagaagtccttctctgtagcaatttttctccgtgctcggattgcaaacataccagcttctgtgcaaacacttctaatctccgctccagtactgtttggacacaggcgggccaacagctcaaatcgaatgtctctttccacactcattgagcgagcgtgaatcttaaagatgtgcgttcgaccctctaagtcaggtaagctgaactcaatcttcctgtccagcctccccggtctcatgagcgctgggtccagagtgtcagggcggttagtggccatgagcaccttgatgttgccgcgaggatcaaagccatccagctgattgatgagctccagcatggttctctgcacttcattgtcacccccagcgccatcgtcaaaccgagcccctccaatggcatcaatttcatcaaagaaaataaggcaggctttttttgtcctggccatttcaaaaagctcacgaaccattcgagctccctcgccgacgtatttctgtacgagctcagacccaataactcgaatgaagcaagcatcagtccgattggcaactgcctagcacagagtgtcttgctgtgctg

SEQ ID NO: 1361 - DNA, 706 bp, Mus musculus
aaaggaactcaacctttaatcaaacaaagacagcaatgctcaatttaaatagtttaaagttatctaaagaatttggaattttagtaacaatttcaagaatttacaggttgttagactaacacccacttcaatacacaggcttttaatttgttttggcaacggatctgatagagtagcatatttatgagatctgttatcttaacatgacattattacagaccttaaaatggacaccagtgggaaatctccaaagcagtccctaggcccctcccatcaggactgaacatagatattgaccacggacaacactgaacactcccatgtgttgtgtccagcagaacacacacaaaaggagcccaaagatagctgcatgtcacacctcctcactcactagaatttcacacaagaattcctgaagtgcctatgctctaatgatgggcttctatcctgagacttaggagacatccaacactaagtcagctgccagaacttaacatttccctttatgaatatgtctgactgaaactagagcatattctgtactatccaattctcctctactctaatcattctagaagacaaaggcctcttatttgcatatccatcttccagatcttattagatctgatatatgatgcacgtacaaaatacatgagctggaaatgatgtcgagttttgactgggtttgcagagaaacagcctggat

SEQ ID NO: 1362 - DNA, 571 bp, Mus musculus
gataatcaagaaacatatctgaatatttctcaagtgaatgtagattattcagaagaaatgttttcatcagtttcacagctggccacagactccatccagagccttctagtaaagaacccagagaaaagaccaacatttttttcctgcctatcccactcatggctgcagcagtgggactttggaagcttgtttcatcctgaggaaacttcaggctcctctcaaattcaggatctgactctcaggtcctctgaagagaagacctccaagtcctcctgtaatgggagctgtggagcccgggaggacaaggagaacatccctggagatggcagcttagttcctaaaagatttcgattcgatgactccttgcccagcccccatgaacttgttccagatttgttctgttagcatttttctctgtgactcatctggactgacgcggaaatttgaaatctctggtgtgagattgtgtttgcagcttcatatattatgtgtatattataaatgcacttctgcttagaagaacttaaggaacagtttaaatgctaggctgctgttggctagcatatcattt

SEQ ID NO: 1363 - DNA, 718 bp, Mus musculus
  misc_feature (1)..(718): n is a, c, g, or t
caagtttacaaaaacaaaacaaaacttttgttcttctatgtacttccgggctcttggtaggtcggtcggcctctgctttgtcaccagagttctcagctgggtttacaaatagacgtgctcaagtctgccattcataataggaaaacattgtcactgtatgcaattgaaggttggtaaaacccatcattgtctttgtgtggattaagtctactataaacagcttcaataacatggcgcttgccagcgagacctcccccgggggannaattcgggatattttctgcagacaaaatgcgcatcacatgggcaagatcaggcattccttcctccccagacttctgcatgatttcttcaacccgtgattccaagtgcttatccaactctgaatctctcttcacggcttcctctgagaccctgggggcatttgaaaagcaaactaatacaacactcatgttatctcgacttcccttatgtaaacaagtgtccactacccaattgcacacattctccaggtcgtccgacacctcaagcctagacttaacaaactcacagagctcctcattgctcatcacatcccagatcccatcacaggccaagacgacaaactcatcctcttctgctctcacaatctcataaacctcaggctctggagaaacaagctgctctgtagggcccnttgcatccacacacttgtagtcatagccccccagagcccgag

SEQ ID NO: 1364 - DNA, 467 bp, Mus musculus
tttttgaaaattgatgaatatatgcgtaacttctcagacctgaggaacgggatggacaggagcggctcgactgcagtgggcgtgatggtctcccctacacacatgtacttcatcaactgtggtgactctcgatcttttttgtgtaggaacggacaggtctgcttttctacccaggatcacaaaccttgtaatccagtggagaaggagcgcatccaaaacgcaggaggcagtgtgatgatccagcgtgtgaacggctcactagcagtgtctcgggctctggggggctatgactacaagtgtgtggatggcaagggccctacagagcagcttgtttctccagagcctgaggtttatgagattgtgagagcagaagaggatgagtttgtcgtcttggcctgtgatgggatctgggatgtgatgagcaatgaggagctctgtgagtttgttaagtctaggcttgaggtgtc

SEQ ID NO: 1365 - DNA, 889 bp, Mus musculus
  misc_feature (1)..(889): n is a, c, g, or t
ccttttttgtttttttttttaggagtcaatcaaaagttttgtcatttatttacaaaaaataaaaaataaaagggtttaaaagcttcaattagttccagcaacacagtccccaaatgccaggcaagggccctctcttttgccagaaagcattgggagggaggaggaggtctctggtctaacctcaggcaggatccaggctgctcaggcagctgcaacagtaagctggacctgagcctggaggcagcagggagatgggccaggctgaaactcnatacgatggtggggactctgggaagcaccctgctgtctctgccagaggaaggagaggccgaggtacagagagcctctcccatccctacactctaccaagagcccaggaccctgggccagtccgaaaaaatctgagagcagaaatcacaaggcactgagtataagagtctatggaaaggcagaccgatgtaggatggtccttggctactgggacatagagggatccagcagtttcagaaccccgcccaccaggtgcaggcttcctgtaaccagtacatggatggcagcagcctcacggagaatgctggccccgctgttggctgtggggtggttgagaagattccttggaaggctctggggctgaaagatgggatcccggccttggctgatccacagcaaggcgtgggagatgcagctgaaaacgagggagctcgtcctagtaggctgaggtgggtgcggggacagcagcagggagcctggcccagcagggtctgggccgcagctgctccagaggttggagctggcatgtttctcagccaggccgttccaatgctgctggtgttggaggcagcggacagcnacctggtccagagtcacagtgaagttctgctggtctgca

SEQ ID NO: 1366 - DNA, 560 bp, Mus musculus
tgcaggtgcgggagcggattcgaatcaacgggaaaccaatcagccccgagctcttcaccaagcacttctggtgcctctataaccagctggaggagttcaaggacgacagccatgtctccatgccctcttacttccgcttcctcacactcatggccttccatgtcttcctccaagagaaggtggacctggcagtggtggaggtgggcattggcggggcttttgactgcaccaacatcatcagaaagccagtggtgtgtggagtctcctctcttggcattgaccacaccagtctactaggagatacagtggagaaaatagcatggcagaaagggggcatctttaagcctggtgtccctgccttcactgtggtgcagccagaaggtcccctggctgtgctgagggatcgagcccagcagattggatgcccgttgtacctgtgtccgccattggaagccctggaggaggttggactgccattgagcctgggtctggagggagcacaccagcggtctaatgctgccttggccttgcagctggcccactgttggctggagcggcag

SEQ ID NO: 1367 - DNA, 99 bp, Mus musculus
aaaaaaaaaacaacatttattttaaaacccaaaaaaaaaaccccaccaaggggggcaaaaaacccccccaaaaaaaaaaacaaaaaaaaaacccaaaaa

SEQ ID NO: 1368 - DNA, 560 bp, Mus musculus
ctagttctagatcgcgagcggcggccctttttttttttttttttttttttttaacagtaacacatttattgtaccacccagcagagtacaaacacaaataagaaaaataaaacactgggcaagttctactctacaaacacaactcttaacctatgacaagttcctcagtcattctggtcgtcatcccagtccttcttcccacttggaggtttgggcccaccagctggttttgccatgatgatctgatccactcttagtacagtgactgcagcattagtggccagtttaatagcccagtattttcccaagtaagtatctaaaatactggcttctaacatatcctttacagcagggacttcagcctcgatatccaaccccacatttttgtttccttcttggtgtacggaataaagtttagagataacttcattggccttcacgccagaattttctgccagtgcccgtggaatcgcttcaaacgcttcagcaaacttcttaatagcatactgttcaagcccaggacacgtctctccatatgatgtgatttgtttagccaattc

SEQ ID NO: 1369 - DNA, 759 bp, Mus musculus
caggaatgtacaaatgtctttattcaaaaatacaaaataaattatctgtaggcatggacaatgacagcagtaaaccattatatatcgtcaaaggaaaccagtaactgatgattacagtggtcagccagccttctcttcagtcattttctccaggtgacttctctgaagttattggtgaggaacctgccttgagcttcctgtcacagttcattgatacagggcaaagcactactctaggagttagaacatgccgcctcccataccccctcccatgccacccattgcacccattccagggtccttctcttctttaggaatttctgtcactacagcttcggctgtagttagcaaggaggccaccccagcagcatccagtaaggcagttctcacaacctttgttggatcaatgatccctttttccaccatgtgcacaaaatctccaagcatggcgtcataaccaacttctgaggaactctgcagaattttctcaactatcaaagatccgtcaacacctgcattcttagcaatcgtcattgcaggaattgtaagtgctcttgtaataatgtctatacctattttctgggcttcattagcaggcttcaatgaatccaaggctgggatgcaccgaagcagagcgcagcccactcctagaacaatgccttcttcaacagctgctcttgtagcattgagagcatcagtaactctgtcttagttctcatgcactgcaacatcacttgttcctccaaccttcaacacagc

SEQ ID NO: 1370 - DNA, 462 bp, Mus musculus
cttcgactacccacagtccttcgccagatgagaccagtgtcccgggcactggctcctcatctcactcgggcctatgccaaagatgtaaaatttggtgcggacgctcgagccttaatgcttcaaggtgtagaccttttagcagatgctgcagctgttacaatggggccaaagggaagaactgtgattattgaacagagttggggaagtcccaaagtaacaaaagatggggtcactgttgcaaagtcaattgatttaaaggataaatacaaaaatattggagctaaacttgctcaggacgttgccaataacacaaacgaagaggctggggatggcaccaccactgccactgttctggcacgatctattgccaaggagggctttgagaagatcagcagaggggctaatccagtggaaatccggagaggtgtgatgctggctgtggatgctgcaattgctgaactt

SEQ ID NO: 1371 - DNA, 10 bp, Mus musculus
tcgactatcc

SEQ ID NO: 1372 - DNA, 480 bp, Mus musculus
caggaatgtacaaaagaccaaaggcggaaatacaaaataaacacatcaaccaggcacaggccaaatcagcagcaaaccaccatacaacgccgaaggaaacgagaaacgtgatgatcacagtggacagccatccttcactacagcacataaaactccacggggacttctccgaagtcacaggtgaggaacccgccctaagacacccggcacggaacatagacacgggcacagcacaaacccgaccccgtatacgagcactgccgcctcccacaccccctcccatcgacacccgattgcacccactccagggtccgtctcaactgcaggaatatcagacacgacagcatcggccgtaagaagaaacgaggacacaccaccaggaccaaggaaggcacttcccacaaccagagatggaccagtgatcacatccagcaccaagtggacaaaacctgcaagcatggcgtgacaaccaacttctga

SEQ ID NO: 1373 - DNA, 709 bp, Mus musculus
gctttagaaaaagtagactttattacagcagcaactgtggtgattcgaatgccccccccgggggccacccctgcagcaccacctttctctcctgcccatgcgccccagcgggatgtgtagaactcagcttccccagtgcccgtgggcctcctgtccacacaagtagggcaggaggcagcaggtcagctactagcccccagctagaaggtggctgctgagaaggcccaggcccacgtctgtgcaaaacaagtaaacaaagtgcagaggggaggaagagaggggaaggggcagggtgatactcaaccagggagcccctaaagccctcctaaataatatgggcgcgaagggtaatactgactggggagaagggacacgaggactgcagcatgcccagggacagccacagcctggctaggggcctggctcaagtgagctctacgaggagacggtgacagtggctgtgttgagtgtactgttcctggtgaagttgaacttgttgagcgtctcctccagcagagaagtcaggcggctctgatcagcctcactaatgaagcccagctgcaccagctcagctgccaagtccgggatgctctcatttggcatcaggtcacagctcaggtgccggttcaatttgtcctccagcttcagcagaactgttagatggtgattgactccctcctccacagattcgatgttgcactgcatcagc

SEQ ID NO: 1374 - DNA, 11 bp, Mus musculus
tcgactatccg

SEQ ID NO: 1375 - DNA, 767 bp, Mus musculus
ctgatcaggattttatttgttgaacctcaaaaagcagaattcagaaatggccacccactactaggacactgagtggtaaaacactgtcaccgcccgtcttttataaggtgcgttcacaggcagacatcaccagagagcagatgtggaaactctaggaggtacatgcgcactcttgggaggcgaaaggctttctgagcccacttcgatagaaacttacaatagattccctgtaagaattctcccggctgtccccactttttatttactaaaaatacagaatcgaaagcttctccctatgtcagtgctctccaaaatgggtaacagaagattcagttcggaaagatacaaaaggtgtttcatcattctagcacagagcccacactgacactaccttgtttgctgatcaaagaccctacagagacctaaggaatcttcaatacataattcgtttcaaagagagccagtcagtagggcactgtgacaggcagaggggcagaatgctggcgaaggcacagagtaaagaatcccgagaaggttttggtgccatttccatttaatgacccagtagtatagcgagcgatctacaggaccggctgtgatcatgccacgatctttctacggacctgctgcaaggacccacggctgccagctgacatcctcaggccccagtactggatgtgcagatgcagccccaatttccgcaaagacttaaggctggggtgtataacggaggtattttttgccagacgggagctctttggtgaaga

SEQ ID NO: 1376 - DNA, 536 bp, Mus musculus
gggacgaagcccccaactttgaggccaataccaccatcggccgcatccgcttccacgatttcctgggagattcatggggcattctcttttcccacccacgggactttaccccagtgtgcaccacagaacttggcagagctgcaaagctggcgccagagtttgccaagaggaatgttaagttgattgctctttcaatagacagtgttgaggatcatcttgcctggagcaaggacatcaatgcttacaatggtgaaacacccacggaaaagttgccatttcccatcattgatgataagggcagggaccttgccatccttttgggcatggtggatccaggcgagaaggacccttaccacatgtctgtgacggcccgtgtggtgttcatttttggccctgacaagaaactgaagctgtctatcctctaccctgccaccacgggcaggaactttgatgagattctcagagtggttgactctctccagctgacaggcacaaagccggttgccaccccagttgactggaagaagggagagagc

SEQ ID NO: 1377 - DNA, 778 bp, Mus musculus
cacttagaaatgtttatttcaaaatgacctatagaagtttgtctagacaaaggtctttagctgatgagtaattgcttgattttacttctaggcaatcagtcaaatcaaactaaatctctttgcccaaactgagaatggccaggcagggaaagctggagagacgagacttcctaagtctcctcactaatttgcaggaaggctctttagtattcccaaagcctctactttgattcctaatatcaaagctggctttggttttctgtttgttaaaaatgatatttacactgtgtagaaacagtactgtaagtcgtggctccctgtcctggcaggcacgtccaagcagagctgctgataaccaagcaaacccactatcctatctatgcccaaatcgtctgcctcggcgggcaggagagcccgctgcgtctcccaggccctgattttctcaggatccacacatcaggcactcctctctgttctccaaagagcacaccatggctgctgtgttcctctccttctcctcctcctccttcagtgccttttccttatctttcagtttttccttgttcagagtgaactggattggattagcggcaggcctcgtccttaagtaatacattccagtctttaaaccctgcttccaaccgtagaagtgcatactagtgagtttgccgtagttgggctcagcaatatggatgtttaaagactggctctgatcgatgaaagcacctctctcggctggcatcttgagaacagtcttctgagagatttcccacacggt

SEQ ID NO: 1378 - DNA, 564 bp, Mus musculus
gaaagtgctgtctatcgcgcagcttccatccctccgtccgagcagcctctcggagttcaacccttcacatctgacagtcgtctctgtcccttcttcgcctcggagctgctaactggtctcgaacctctcagcacttcagcttctagcggcgatgcatgtgatcaagcgagatggccgccaagagcgagttatgtttgacaaaattacatcacgaatccagaaactctgttatggactcaacatggactttgttgatcctgctcagatcaccatgaaagtaatccaaggcctatatagtggggtcaccacagtggaactggacaccctggctgctgagacagccgcgaccttgaccacgaagcaccctgactatgccatcctggcagcaaggatagccgtctctaacttgcacaaagaaacaaagaaagtgttcagtgatgtgatggaggatctctacaactacataaatccgcacaacggcagacactctcccatggtggccagctcaacactcgacattgttatggccaataaggatcgcctgaattctgccattatctatga

SEQ ID NO: 1379 - DNA, 590 bp, Mus musculus
ggggcacagtctattttaaataatgagatcagttgtctggaaagggatatggtgtccagagtgagaaaggggaccctgggcttgggacccattgttcagataggaaaactgagatcaggccaggtatgatttgggttagggagtctgggtggagcggggggtcaacctcagcagggcaggcactgtgaccctgatcttctcagacttcaggaatgccacgtgcttcccataataggcagcctcattaatgaacacagggtacacaatggagtccccctcatacagtacgtcttctccgctgaaaagcttgaagatgggttcaccaggcctcagtggctcaaagtcatggccctgcagttgagggtgcacagtgccagccaggtcaccatctgcagtgcgtgggaagtccacactgcccaagttcctgtagatatccatctcaaaggcgggtaagtccatgccttggttgaagagctcgatgaagtccagaatggatgccaccagagctcgcatccgggagaacaggtcggcccgcagcacgccctgaggctgtgggcccatctccagacagattccattcttggatatag

SEQ ID NO: 1380 - DNA, 552 bp, Mus musculus
cgacactcaccctcagaacattccagaagagggactgaggttgcaagggggaacaaaaatttggctgctggtgtcttgaacttggcttctgggtacagttcttccccacactgggagatgtcctccctacctgggtcccgggagcccctgctccgtgtggctgtgactggaggcacccacgggaatgagatgtgtggtgtctacctggcccggtactggctacagaacccaggggagctgcagagacccagcttctcagccatgccggttctggccaacccagcagccacagctgcctgttgccgttacctggaccgtgatctcaaccgctcctgcaccctcaccttccttggttccaccgctacccctgatgacccctatgaagtgaaaagagcccgagagttgaaccagctgctgggtcccaagggcacaggccaggcttttgactttaccctagacctgcacaacaccacagcaaacactggagtctgcctcatctctgaatccaacatctccttcaacttgcacctgtgccactacctacagcggcag

SEQ ID NO: 1381 - DNA, 813 bp, Mus musculus
ccattttagtggacatctttattgtttaatagatcatcaatttctgcagacttacagctgggatttcatcagattgccatgctgagtcaagaacagtgagtgacgaagctaaccagaggctacatacgtcagagagagagctcagcctttacagctcacttcctttctcaggcagaatataaatagacgccctctacaatgcacaatggttttagtcactaaggaatttaaatgggatcttgaagaacacagacaaatcctgatgcagtaaagacgagctgagatgctgtgcaactgtttaagggttcctggtgccacatctcagccactagctgaatcttgcgctaacaccaaatggagatgtggaaaacactaggttgacttaggagcacaggaaccaaaggcaggaaagaaaatactaaacattgctgagagcatccaccccaggaaggactttaccttccaggagctctagactggcaccgcccccagtgctcacatggctgactttatcctctgtgttccatttggcacagcaagtggtagtgtctccaccacctatgatagtgatgcaacccctagaagtggctttcaccacctcatccatgagtgacttggttcccctggcaaaggcttcccattcaaataccccaacaggaccattccaaacaatctgcttagctcgacccacagcctcggcatatttcttgctgctctcagtaccacagtccaagcccatccagccagcaggtataccagaggccacagtagcttggccagtcttggcattctcatcagatttgtcagcagtga

SEQ ID NO: 1382 - DNA, 566 bp, Mus musculus
ctcttcctcatctccgggcctttcgacctcacggtgttgccaaaatgtcgctttccaacaagctgactttggacaagctggacgtgaaggggaagcgggtcgtgatgagggtggacttcaacgttcctatgaagaacaaccagataacaaacaaccaaaggatcaaggctgctgttccaagcatcaaattctgcttggacaatggagccaagtccgttgtccttatgagccacctgggccggcctgatggtgttcccatgcctgacaagtactccttagagccagctgctgctgaactcaaatctctgctgggcaaggatgttctgttcttgaaggattgtgtgggcccagaagtcgagaatgcctgtgccaacccagcggctgggactgtcatcctgctggaaaacctccgctttcatgtagaggaagaagggaagggaaaagatgcttctggaaacaaggttaaagctgagccggccaaaattgatgctttccgagcctcactgtccaaactaggagatgtctatgtcaatgatgcttttgggactgcacaccgagcccatagc

SEQ ID NO: 1383 - DNA, 659 bp, Mus musculus
ggggtcacccaggcagccacctcaaatcaggcctacacccagctttattagggacctgcagggacaagtacccagaccctatgcaaaatcagaaatagtgagggctcccaaggaccctcagtttgttgagtcagagagcatccagtgtggccctagcagtggcttcaggagtactcatgagtgaatttagcatggaagtgcctcagtttctccagcagcacccgcagtttctccatggggggcagaatggtcatcctgaaaaggacaaatggtcagcgtgaagtacaggtccattagtggcagggtcaacccatcccgggtctcaccggaaatgataggtgccctcctgctgcccaaagccactcccaggcacaacgcagatgccagtctcttccaggaggcacagacagaagaacatgtcaggggccaggcccaggtcctgggggtcaggagggtggtcagctcacagcctggcgccaggcccacaccctgctcggcccccatgtagccctgcatgccccacctgcgcacgctgcactgctttcaaaggcagctgaatttgagggaaggaatacatagcgccctgcaccgggttgcagcggatcccgggggcctcgttgaagacctgctccgtgagtttagccttggctgccagttca

SEQ ID NO: 1384 - DNA, 532 bp, Mus musculus
  misc_feature (1)..(532): n is a, c, g, or t
cctgcccttgctctccaaccccaagcgcctgggctgagcactcttgggcttggttctctgttgcccgcgggcggctgactttccagtcagtgatgcatcttcacactccagggcaggtgcagacccgtgaatgcatcgaggccgtaatccgctttgctttcgaagagggactcttcctgatggctgatgaggtataccaagacaatgtatatgctgagggctctcagttccattcattcaagaaggcgctcacggagatggggccaccatatgccacgcagcaggagctcgcgtctttccactcagtctctaagggctacatgggcgagtgcgggtttcgtggtggctatgtggaagtggtaaacatggatgccgaggtgcagaaacagatggcgaaactgatgagcgtgcgggtgtgtccaccagtgccgggccaggctttgatgggcatggtnggtcagtccgccaaccccctcggagccgtccttcaagcagtttcaagcagtgagcagaccagaccaggccaaagata

SEQ ID NO: 1385 - DNA, 735 bp, Mus musculus
ggagagatagagatatatttcctctgttgcatatttcagacttcgcactgagcttcaggcacaactcgactcttgtgagagctctgacagacagccttcctgtgccgccagtgggcttcctcctccagtagggaaacttcatggatctcagcaggccttgatggcgcgcatttcctagggaagcccgagagccggccccagctctgctctagggctccctggctcccagaggagaggcctgctcactaaagtccaactccacagtagcccccacagatcacctgtcctccgggcctcagagcctcagcagtgcgcagttcagatgcaggctggggatggaggctctggagagggaggcagcccatgcctccccagagcagaaaccgatatgctctgtggtgctccccatggccatggcccatatcctggggctgctctgagccctattgcacatcgtcctccctctgccactcattttaattattaaaaaagtataaactaacgaggagcagaggaagatcctcctcatggctccagtggaccgctggtctcttgcagggccgttagcagtagggagtactgcacccaccttccctgccctcagtgtaggttcctgttggctcaaatgggcaaactgcctgggcctctggttcttgtctgtgggagagatgtccctccgttgtctgtaaggtgcaattccccggctcctccgggttgtgctggctggggtctgct

SEQ ID NO: 1386 - DNA, 556 bp, Mus musculus
tgggggcctgctgggaccactggatgagcccgtagccatgcagcgctgggcccggggccccaacctcacagccactgtggtcgggattgaccccacctatgttgtggccacatcgtatgacatcacggtagatgcggataccgaagtcacgcagtacaagcctccactgagcctgccactgcggccgggagcctggactgtccgcttgcttcagttctgggaacccctgggtgagacccgcttcctcgtgctgccgttgacgttcaaccgcaaactacctctcaggaaagatgatgccagctggctgcatgcgggaccaccccacaacgaatacatggagcagagtttccagggcctaagtggcatcctgaatctgcctcaggcagaggccctggaggaggctgcccggaggcacacagagctcacgggttctgcacttgaggcctggacagatggggaactgagcaatttctggtctgtggcaggattgtgtgccataggaccttctgcttgtccctccctggagctctgcagactgaccagctggagctctctg

SEQ ID NO: 1387 - DNA, 942 bp, Mus musculus
  misc_feature (1)..(942): n is a, g, c, or t
attttcattatataatattttatttaaaaattttgttttttcagagtacactttctttctcattaacaactcccacggtgggaagacagtttatcacttagtcttatacttttggacagctcacttctgcacaattgagatacatttgaagagtagtctgtttgcaatctgtcatattttaatccacaaacaaggagaactccctaaattgaacttgtctaaatccagctttcctcaacctccttcctaagacttagacaaattagtcattgagagcatctcctgattaaatgttccctagaagcagagccatcaacagagctggtgtcacctgaacaagaatgggaggttccaaagggaatactttcgagcttcatgcaaagtctaactcaggagggaacaggcctccctcctggctgaagagatgctcttatcctgacagcaatcagctggctctccttaagaaatggtggtcaaaggcaacatgagctcatgaaatgttcagtctcaccgcgaggctgtgagctagtgcccacactcagtggagtatggaacacagactcacgaatggtcgaacctaactcctcaaacctcttcctcaacaaataaattctgaaaataaccatgtaattagaagacattctgcccaccaatgggcttatccttcatcccccctcactgcgaggtgaacggcattggtaaagcagagacaaggaggcacacaatcaaagtgctgcacccaggtcagagcttccacagcatggcaaccgctctgcagatgccgacatcgtggtaattgaagtagcaaagcccagcaaaggtcanagctgagagtgccagagggctgcctggcagcctcgcagggtgtccccatgacgtatcggtaaccacttgtcnaaggcacagtgactgtgcagggtgaggggctgcagcagagagtag

SEQ ID NO: 1388 - DNA, 478 bp, Mus musculus
gcggttctcttaaagctgggcgttctctgcagtggccaaggagctcgagctctcctactccgaagccgggtggtcagacccgcttatgtgtcagcatttctccaggaccagcctacccaaggacggtgtggtacccagcacattcacctgtcaccaagccaccactctggttccaaggctgcatctctccactggaccagtgagagggttgtcagtgttctgctcttggggctgatccctgctgggtacttgaatccctgctctgtggtggactactctctggctgcagccctcaccctgcacagtcactggggccttggacaagtggttaccgactacgttcatggggacaccctgccgaaggctgccagggcaggcctcttggcactctcagctttgacctttgctgggctttgctacttcaattaccacgatgtcggcatctgcagagcggttgccatgctgtggaagctctgac

SEQ ID NO: 1389 - DNA, 893 bp, Mus musculus
aaggaaaagaaggttgggagtaaggatgatccttactttcccccaaacacctttatacaaaccattgggagtctccaaagaccagcgggagagccaaggcaggaacaatgtccagccagtccgtcctgaggaaatgaagagtccagctccaggagaaaggtaaacaggaggaaaccaccagtccagcaaccccatgtcagcacaaagaatgggggtttgaaaaatattcagctatagaagccatggcaggcagtggaaaattcacaccacccacttctggagtggtggggacgatgctgtcctcaactgtcaaaggcactactgcccagaggaaggggagacagtgtcagagccctgctagctccacattctctcctctgttgatgaccaagaagacgattcagcattcctggggcaagggctgacatcttgggatcaaagcgacacaggagtcttgtttcaggtcttctgaggctcactgctcagtgggtgaactctgactctgcaacatcaagcttttccaaggttgaactcaaatttagtatttgcaaaggttgtccaactacaggtgagaaactggggccaggaacaggtgaaccctcacttatttcctccaaaggtggagtctgaggtaagacatcaggacgcccaaggtgtacatctggctccacttccgccttggtggtcacttgtgctctgtgttcaccagaggcgatcagctgggaggtgcaggagttgccgctggggcctgatcgccgagagaaagacgggccagaccgaaactttttggtaggagagggcttcaagggaatcttcttgaacactgtgttgcacatgaagcgctggaacgctcagcatagaagctggacgagcactgacacgtatcccatcat

SEQ ID NO: 1390 - DNA, 607 bp, Mus musculus
tcaggtgcctaggttttcctttaggtttgttctatccgagacgcgggactcccggggcccggctcaagtgttcctgtctggtaagagaaggtagctttggcggagagcagttcaagttgctaggaaggtgcgagactgcagctctcccccatgccgggcaagtggtgcggtcctgagcttgtcctggagcctgaacaacgcctgtgagaagcccgccgaacgcgggttctgtgaagagacgtggggaagattcgattccgagaaaaggaaaagccggattgaaagggagcgaagccgctgagggggagggggctgccaagatggcgtccgcctcctcagggccagcggcggccgggttttcatcccttgatgccggggcccctgctggtaccgcagcagcatctggaatcaagagagccacagtatctgagggaccttccgcctctgtcatgcctgttaaaaaaataggccatcgaagtgttgattcctctggagagactacatacaagaagacaacttcatcagccttgaaaggtgccatccagttaggcatcactcacactgtgggcagcctgagcaccaaaccagagcgtgatgtcctcatgca

SEQ ID NO: 1391 - DNA, 759 bp, Mus musculus
ccttttttgtttttttttattacaacagacacaccctttatttagtcacagtggtaaatggtacagtttattcttcagattctccaggcttacggatgtcatcaatcttcagaatcatcctaaccatctgggtggcaagagagatctgctgctttttgccaatcaaggtttctatgacatgctgatactgcatatcgttactgcccttgtgcaaacagtcaatccccagggcagggttagactccttcacctgtctggctcgaacttcagtcatggtctgaatgggattcatgccactattttctgaaagggccatggggatgacctccaaggcatctgcaaaagctctcatggcatactgttccaaagttgggcacttgtctgcctcttggctgactgccagggcgcaggatatttcggctgcccctcctccatacacaacacggttgtcacggatgaggttccggatgacacacggggcatcatggagagatcgttttgcttcttctatgatcatcttgtttcctcctctgatgaaaatggtcacagctctagagttcttacacttctcgataaccagcattttgtcttttgtagtgccaaaggagatctcctgcaccacaccagcaaagcccagcttctcagaggtgagctctgagaaccgtgggacaatccgtcctcctgttgcaatggcgatcagctcaatctcaggtccccctacccagcggactgcaggtaggccgttctgaagaagtaagt

SEQ ID NO: 1392 - DNA, 588 bp, Mus musculus
aaccctgaacctctgattcagactgcaaaaaccacgctgggctccaaagtgattaacagctgtcaccgacagatggctgagatcgccgtgaatgccgtcctcacggtggcagatatggagcggagagatgttgactttgagctcattaaagtggaaggcaaagtaggtgggcggctggaagacaccaagctcataaagggtgtgatcgttgacaaggacttcagccacccacagatgccgaaaaaagtggtagatgctaagattgcgattctcacgtgtccatttgagccacctaaacctaagacaaagcacaagctggatgtcatgtctgtggaggactacaaagccctgcagaagtacgaaaaggagaagtttgaagagatgattaagcagattaaagaaactggtgctaacctagctatttgccagtggggctttgacgatgaagccaatcacttacttcttcagaacggcctacctgcagtccgctgggtagggggacctgagattgagctgatcgccattgcaacaggaggacggattgtcccacggttctcagagctcacctctgagaagctgggctttgct

SEQ ID NO: 1393 - DNA, 531 bp, Mus musculus
aaccctgaacctctgattcagactgcaaaaaccacgctgggctccaaagtgattaacagctgtcaccgacagatggctgagatcgccgtgaatgccgtcctcacggtggcagatatggagcggagagatgttgactttgagctcattaaagtggaaggcaaagtaggtgggcggctggaagacaccaagctcataaagggtgtgatcgttgacaaggacttcagccacccacagatgccgaaaaaagtggtagatgctaagattgcgattctcacgtgtccatttgagccacctaaacctaagacaaagcacaagctggatgtcatgtctgtggaggactacaaagccctgcagaagtacgaaaaggagaagtttgaagagatgattaagcagattaaagaaactggtgctaacctagctatttgccagtggggctttgacgatgaagccaatcacttacttcttcagaacggcctacctgcagtccgctgggtagggggacctgagattgagctgatcgccattgcaaca

SEQ ID NO: 1394 - DNA, 775 bp, Mus musculus
attacaacagacacaccctttatttagtcacagtggtaaatggtacagtttattcttcagattctccaggcttacggatgtcatcaatcttcagaatcatcctaaccatctgggtggcaagagagatctgctgctttttgccaatcaaggtttctatgacatgctgatactgcatatcgttactgcccttgtgcaaacagtcaatccccagggcagggttagactccttcacctgtctggctcgaacttcagtcatggtctgaatgggattcatgccactattttctgaaagggccatggggatgacctccaaggcatctgcaaaagctctcatggcatactgttccaaagttgggcacttgtctgcctcttggctgactgccagggcgcaggatatttcggctgcccctcctccatacacaacacggttgtcacggatgaggttccggatgacacacggggcatcatggagagatcgttttgcttcttctatgatcatcttgtttcctcctctgatgaaaatggtcacagctctagagttcttacacttctcgataaccagcattttgtcttttgtagtgccaaaggagatctcctgcaccacaccagcaaagcccagcttctcagaggtgagctctgagaaccgtgggacaatccgtcctcctgttgcaatggcgatcagctcaatctcaggtccccctacccagcggactgcaggtaggccgttctgaagaagtaagtggatggcttcatcgtcaaagccccactggcaaat

SEQ ID NO: 1395 - DNA, 836 bp, Mus musculus
  misc_feature (1)..(836): n is a, c, g, or t
ccttttttgtttttttttttatttgaaaatcttaaatttaatagaaaatatcacattgtaaacaagtccattgatccattagcttaacacagaacaatagcacaatcacatataaaaactacaaacaaatgctggtaccaaacacagtacttctggaggggcctgggcaatgttctgaaagacctctcctggaaataggcagctctagcttcagacaggcacaaggacggagaaggaggcagctgactactccacagaggcagagaagataaagcaaggccaagcagaggagcctgggaagggagcctgaaggacaggggggtgaagggtttagttctgatgctgaggacagaggatataaacccgaagtgnggagtgctggggtgagttaagcgaggagagagcagtagcatgtataatcttggcactcagctctgaggaggccacagagcacagcgcatgtgcagatgtcagctccccaccttgggtaaaaacactgaaatcatagcgtgtctgtgacccacgcggatctccttactagggagtgtgtaagaatctgttgaggaaaacagagctcagacaggaggcctttccacttttctcttgttggaatcttgagagagaacaagacaaggctggcctttggaagctctgagtttacctgtgaaagccatcttagccccacatgcccagaaggcctgtttacagaaaggctagctactgacaacaggaaagacaatccacacaatgggaacaagggacaggcttctcccccaggttcttggttctggcaggaagggctgcttgcttgtgcataattcaagttctggaagtgt

SEQ ID NO: 1396 - DNA, 570 bp, Mus musculus
gagagttaccactccttcatgcggaataatttcttcaagcacattgacatccaccctgaaaacacccacattttggatggaaatgcggctgacctgcaggccgagtgtgacgcctttgaggagaagatccaggctgccggagggatcgaactctttgtcggagacattggccccgatggacacattgccttcaatgagccaggctccagcctggtgtccaggacccgtgtgaagactctggctatggacaccatcctggccaacgctaggttctttgatggtgatcttgccaaggtgcccaccatggccctgacagtgggggtcggcactgtcatggatgctaaagaggtgatgatcctcatcacaggcgctcacaaggcctttgctctgtacaaagccatcgaggagggcgtgaaccatatgtggacggtgtccgcctttcagcagcacccccgcactgtgtttgtgtgtgacgaggacgccaccttggaactaaaagtgaagacagtcaaatatttcaaaggtttaatgcttgttcataacaagctggtggaccccctgtacagtatc

SEQ ID NO: 1397 - DNA, 776 bp, Mus musculus
ctttttatctcctctgtatttatcttttaaagcagaatgtgattggacactgttatttccattcacaagccttgctgagttacaagacctaggaaacttagggttgttctcgggactttggaaaacaagccacttggggaattcctgtcaggttgttttaacttgtgtttacttctaagactaatacatgcagaattaactacaggaaatgaaaattttaagatgtaatttaagccatcttaatttggtctcctaaggaatccagctcaacagctaaacacttcagaccagagcaaacatgaacagtaggttacgttacgtcttataacaaacgctctatcaacctcttgagttaaacctatagtatcacagtatcacatgtagaaattttatcttccccttagttttcatgccacacagatgttttaaatgttaacaaaaataaacaaaaatcatggaaaatatattatcagaaggaatgaaggtaagcaaacacatagttctggtgacttagtctacttcttccatgcgtgatgtgtcgtcatctccttccaggggaggcatttcttcagttacagcagcactggtgtcatccacagtaggatcatcctcatcaatacctagaccaagcttgatcatcctgtagatcctgttagcatgggtctggggatcttccagactgaagccagaagataggagtgcagtttcatacagcaagatgaccagatccttcacagatttgtcattcttgtcagcctctgccttttgccttaagg

SEQ ID NO: 1398 - DNA, 578 bp, Mus musculus
tgtcctggtgcggagcgtcacgtctcgtgcgtgttcattcagccacgatgcctgaggaaacccagacccaagaccaaccaatggaggaggaggaggtcgagacctttgcctttcaggcagaaattgcccagttaatgtccttgatcatcaataccttctactcgaacaaagagatctttctgagggagctcatctccaattcatcggacgctctggataaaatccgttacgagagcctgacggaccccagtaaactggactcggggaaggagctgcacatcaatctcattcccagcaaacaggaccgaaccctgaccattgtggataccgggattggaatgaccaaggccgacttgatcaataaccttggcaccattgccaagtcgggcaccaaagccttcatggaggctttgcaggctggtgcagatatctctatgattggccagtttggtgttggtttttactctgcctatttggttgctgagaaagtgactgtcatcacgaagcataacgacgatgagcagtatgcctgggagtcctcagctgggggatccttcacagtgaggactgacacaggt

SEQ ID NO: 1399 - DNA, 526 bp, Mus musculus
tgtcctggtgcggagcgtcacgtctcgtgcgtgttcattcagccacgatgcctgaggaaacccagacccaagaccaaccaatggaggaggaggaggtcgagacctttgcctttcaggcagaaattgcccagttaatgtccttgatcatcaataccttctactcgaacaaagagatctttctgagggagctcatctccaattcatcggacgctctggataaaatccgttacgagagcctgacggaccccagtaaactggactcggggaaggagctgcacatcaatctcattcccagcaaacaggaccgaaccctgaccattgtggataccgggattggaatgaccaaggccgacttgatcaataaccttggcaccattgccaagtcgggcaccaaagccttcatggaggctttgcaggctggtgcagatatctctatgattggccagtttggtggttggtttttactctgcctatttggttgctgagaaagtgactgtcatcacgaagcataacgacgatgagcagt

SEQ ID NO: 1400 - DNA, 790 bp, Mus musculus
ctttttatctcctctgtatttatcttttaaagcagaatgtgattggacactgttatttccattcacaagccttgctgagttacaagacctaggaaacttagggttgttctcgggactttggaaaacaagccacttggggaattcctgtcaggttgttttaacttgtgtttacttctaagactaatacatgcagaattaactacaggaaatgaaaattttaagatgtaatttaagccatcttaatttggtctcctaaggaatccagctcaacagctaaacacttcagaccagagcaaacatgaacagtaggttacgttacgtcttataacaaacgctctatcaacctcttgagttaaacctatagtatcacagtatcacatgtagaaattttatcttccccttagttttcatgccacacagatgttttaaatgttaacaaaaataaacaaaaatcatggaaaatatattatcagaaggaatgaaggtaagcaaacacatagttctggtgacttagtctacttcttccatgcgtgatgtgtcgtcatctccttccaggggaggcatttcttcagttacagcagcactggtgtcatccacagtaggatcatcctcatcaatacctagaccaagcttgatcatcctgtagatcctgttagcatgggtctggggatcttccagactgaagccagaagataggagtgcagtttcatacagcaagatgaccagatccttcacagatttgtcattcttgtcagcctctgccttttgcattaagggttcaataatggag

SEQ ID NO: 1401 - DNA, 591 bp, Mus musculus
tgtcctggtgcggagcgtcacgtctcgtgcgtgttcattcagccacgatgcctgaggaaacccagacccaagaccaaccaatggaggaggaggaggtcgagacctttgcctttcaggcagaaattgcccagttaatgtccttgatcatcaataccttctactcgaacaaagagatctttctgagggagctcatctccaattcatcggacgctctggataaaatccgttacgagagcctgacggaccccagtaaactggactcggggaaggagctgcacatcaatctcattcccagcaaacaggaccgaaccctgaccattgtggataccgggattggaatgaccaaggccgacttgatcaataaccttggcaccattgccaagtcgggcaccaaagccttcatggaggctttgcaggctggtgcagatatctctatgattggccagtttggtgttggtttttactctgcctatttggttgctgagaaagtgactgtcatcacgaagcataacgacgatgagcagtatgcctgggagtcctcagctgggggatccttcacagtgaggactgacacaggtgaaccaatgggtc

SEQ ID NO: 1402 - DNA, 760 bp, Mus musculus
ctttttatctcctctgtatttatcttttaaagcagaatgtgattggacactgttatttccattcacaagccttgctgagttacaagacctaggaaacttagggttgttctcgggactttggaaaacaagccacttggggaattcctgtcaggttgttttaacttgtgtttacttctaagactaatacatgcagaattaactacaggaaatgaaaattttaagatgtaatttaagccatcttaatttggtctcctaaggaatccagctcaacagctaaacacttcagaccagagcaaacatgaacagtaggttacgttacgtcttataacaaacgctctatcaacctcttgagttaaacctatagtatcacagtatcacatgtagaaattttatcttccccttagttttcatgccacacagatgttttaaatgttaacaaaaataaacaaaaatcatggaaaatatattatcagaaggaatgaaggtaagcaaacacatagttctggtgacttagtctacttcttccatgcgtgatgtgtcgtcatctccttccaggggaggcatttcttcagttacagcagcactggtgtcatccacagtaggatcatcctcatcaatacctagaccaagcttgatcatcctgtagatcctgttagcatgggtctggggatcttccagactgaagccagaagataggagtgcagtttcatacagcaagatgaccagatccttcacagagttgtcattctggtcagcctct

SEQ ID NO: 1403 - DNA, 573 bp, Mus musculus
gcacgcgcagcgtttcgcgcgacgattggctgcctcggtggcggcgccacaggaccgggcaactacgcgagcggagtgggcgcttaaggatcccgcggctcctcagtgtcggcggcggaggcaagcggtggcagtgacagcagtgaccactgagcagtaattgcccaagatgtcgaatatcaaaatcttcagcgggagctcgcaccaggacttatcccagaaaatagctgaccgcctgggcttggagctaggcaaggtggtgactaagaaattcagcaaccaggagacctgtgtggaaattggagaaagcgttcgtggagaggatgtctacattgttcagagtggatgtggtgagataaatgacaatctaatggagcttttgatcatgattaatgcttgcaagattgcttcagccagcagggttactgcagtcatcccatgcttcccttatgcccgccaagataagaaggataagagccgggctccaatctcagctaagcttgttgcaaatatgctatctgtagcaggtgcggatcatattatcaccatggatctacatgcatctcaaattca

SEQ ID NO: 1404 - DNA, 727 bp, Mus musculus
cctttttgtttttttttttgctgtctcaaaaagctttatttttacttggtccaagacttgacagaggctccagggcggttacaaagctgcctagtggcttgagaggttcattcaggtggaggtcccagggcgggctggtgcagagcagaggggggagccccttggaaggtacagaggcctcctagtcgtgcttgagagtgaggcgctcaaagagatactcgcccagagacccctggggcgcgccagtctgcgctggttgtggccccgccaccctgcggaggttggtcagatggttgcccatcttcttgatgagtttcacctccttatccagatagtggctttccaggaagtcacagagatgagggtccgcgcgggcagaacccagggcatgcagatccaagagggcctgattcaggttcttctccatggccaaggcagcttccatggcctcctgggttttaccccattcatcttgagatggcttctgcacatcctggaagagtgcacggcccccgcgatcgttctgaaactcgaggagacgctccgcgccctcgcgcttctcctcggccaattcgtggaagaagtggcctacgccctccagagccacgtcatcccgatcaaaaaagaagcccagagagaggtaggtgtaggaggcccgcagtgcaagttgaccaggcggttcacggcagcttccacctcggtggaataattctgacgaatctgagag

SEQ ID NO: 1405 - DNA, 578 bp, Mus musculus
gtcagaattattccaccgaggtggaagctgccgtgaaccgcctggtcaacttgcacctgcgggcctcctacacctacctctctctgggcttcttttttgatcgggatgacgtggctctggagggcgtaggccacttcttccacgaattggccgaggagaagcgcgagggcgcggagcgtctcctcgagtttcagaacgatcgcgggggccgtgcactcttccaggatgtgcagaagccatctcaagatgaatggggtaaaacccaggaggccatggaagctgccttggccatggagaagaacctgaatcaggccctcttggatctgcatgccctgggttctgcccgcgcggaccctcatctctgtgacttcctggaaagccactatctggataaggaggtgaaactcatcaagaagatgggcaaccatctgaccaacctccgcagggtggcggggccacaaccagcgcagactggcgcgccccaggggtctctgggcgagtatctctttgagcgcctcactctcaagcacgactaggaggcctctgtaccttccaaggggctcccccctctgctctgc

SEQ ID NO: 1406 - DNA, 578 bp, Mus musculus; identical to SEQ ID NO: 1405

SEQ ID NO: 1407 - DNA, 708 bp, Mus musculus
gctgtctcaaaaagctttatttttacttggtccaagacttgacagaggctccagggcggttacaaagctgcctagtggcttgagaggttcattcaggtggaggtcccagggcgggctggtgcagagcagaggggggagccccttggaaggtacagaggcctcctagtcgtgcttgagagtgaggcgctcaaagagatactcgcccagagacccctggggcgcgccagtctgcgctggttgtggccccgccaccctgcggaggttggtcagatggttgcccatcttcttgatgagtttcacctccttatccagatagtggctttccaggaagtcacagagatgagggtccgcgcgggcagaacccagggcatgcagatccaagagggcctgattcaggttcttctccatggccaaggcagcttccatggcctcctgggttttaccccattcatcttgagatggcttctgcacatcctggaagagtgcacggcccccgcgatcgttctgaaactcgaggagacgctccgcgccctcgcgcttctcctcggccaattcgtggaagaagtggcctacgccctccagagccacgtcatcccgatcaaaaaagaagcccagagagaggtaggtgtaggaggcccgcagtgcaagttgaccaggcggttcacggcagcttccacctcggtggaataattctgacgaatctgagag

SEQ ID NO: 1408 - DNA, 537 bp, Mus musculus
gtcagaattattccaccgaggtggaagctgccgtgaaccgcctggtcaacttgcacctgcgggcctcctacacctacctctctctgggcttcttttttgatcgggatgacgtggctctggagggcgtaggccacttcttccacgaattggccgaggagaagcgcgagggcgcggagcgtctcctcgagtttcagaacgatcgcgggggccgtgcactcttccaggatgtgcagaagccatctcaagatgaatggggtaaaacccaggaggccatggaagctgccttggccatggagaagaacctgaatcaggccctcttggatctgcatgccctgggttctgcccgcgcggaccctcatctctgtgacttcctggaaagccactatctggataaggaggtgaaactcatcaagaagatgggcaaccatctgaccaacctccgcagggtggcggggccacaaccagcgcagactggcgcgccccaggggtctctgggcgagtatctctttgagcgcctcactctcaagcacgactagg

SEQ ID NO: 1409 - DNA, 708 bp, Mus musculus; identical to SEQ ID NO: 1407

SEQ ID NO: 1410 - DNA, 827 bp, Mus musculus
ccttttttgtttttttttttttttcactgttcaaggttttatttggcatgacacttgggtggttggttccatcatccatatgcagatcttacatctcacataatattgcaatgcacactacagacacatataatatataaaatatcctgtacaacatttatgcacaagatatgcatcatggacgtacacactggagccaggttatacgacttaactgggaactcgtcggcctaggcatgtttggtgcagggcagcaatgcagcaggctcacaggggtaatcgaagcctgcagttggcagtgtgtctcagagacagtgggactgtcacactaaccaggtcaccactacacaagtaccacttggcagcagggcagagctgtggggagtgagatgtttccccacaccatctcaacaccactgtactaaccacagctcagacgagaagggtgtggtctgcctagaagccctgctgcagcctggacagtgaagtgctaggacacggggaagactttagaactgcagctccttctggattccccagagggtgtctgcgctcttcttcaggcgggcctcttcctcaggagtcagtgtcaccttcacaacatccgagattccattttgtcccaggatacatgggacactgaggaagacatcctcattgattccatagagacccttaatcatggtggaaatgggatgcacccgcctaaggttcttcattatgctctcagccaagtctgccacagagaggccaatggccaggatgtgtaactttcagcttgatcactcgtagcactgtccaccactgcttgtgaactccttcactgc

SEQ ID NO: 1411 - DNA, 456 bp, Mus musculus
tcgccgagctcgggccacgctgcttctcctcgccagtcgcccccccatcgtgcactagcggtctcaaaagattcaaagtccaagatggcaaccctcaaggaccagctgattgtgaatcttcttaaggaagagcaggctccccagaacaagattacagttgttggggttggtgctgttggcatggcttgtgccatcagtatcttaatgaaggacttggcggatgagcttgcccttgttgacgtcatggaagacaaactcaagggcgagatgatggatctccagcatggcagcctcttccttaaaacaccaaaaattgtctccagcaaagactactgtgtaactgcgaactccaagctggtcattatcaccgcgggggcccgtcagcaagagggggagagccggctcaacctggtccagcgaaacgtgaacatcttcaagttcatcatgcccaacatt

SEQ ID NO: 1412 - DNA, 796 bp, Mus musculus
ggtgtttgtttttattcccatcaccttagaacaaggttgtcaaaatttctactctccccttctagggcactgcatcagcacatacacagcaggacagagaaccagccaagaagaggaggaagaaatgcctgagttaatgtgacctttggggcatctgcttcatttgtgcccaacagtaccccttgtcacacagcctgcactgatgttggtgtcctggttctgaacgcactgaattgtgccttccgttaggaggactttcctgggcaggtcctgctacagaaaaatggctgccttttgcaaaaaagcacatctgaaagcctgagtttaggaacctgcaccgctccaataaagctccacaggagcaaatacagaacctccagacagagctagggtccaggctggcttcgtttttccaaggagcctttggtgagttcaattatctggtaaatatccagtgcttcaccctgggggatcccatatctcctttccatcccagttgggttagaaggagttttacagtccatggtcacttccttcctgaggcactggtcaatgtctactgcactgaaaaaggcgactgactggggcagatcattcagacccagcttataggcaaacatgcacctggtcaggagattggtgatctgcagtgccagggcggcacggtagcggtcctcctcacgcaccaggtagcgaacctcgtcgtggatgctgatgcagaagcgcccatcaatggcaaattcctcaaacagccacttcatggtcacaagcatgagatgtaagtagtctacagcag

SEQ ID NO: 1413 - DNA, 589 bp, Mus musculus
acgtatcaccatggcaacggaccttataatgatgtgaatatccctggttgctggtttttcaagctgcctcacaaggacggtaacaactacaatgtgggcagtccctttgccaaagatttcctgcccaagatggaggatggcaccctgcaggctggcccaggaggtgccagtgggcctcgtgccctggaaataaataaaatgatttctttttggaggaatgctcataaacgtatcagttcccagatggtggtatggctccccaggtcagctctgccccgggttgtgaccaggcaccccagcttcgatgaggaaggccactatggggccatcctaccccaggtggtgactgctggcaccatcacccgtcgagctgtggagcccacgtggctcactgccagtaatgctcggcctgaccgggtaggcagtgagttgaaagccatggtgcaggctccacctggctatgtccttgtgggtgctgatgtggactcacaggaactgtggatcgcagctgtacttggagatgctcactttgctgggatgcatggctgcacggcctttggctggatgactctgcagggcaggaagagca

SEQ ID NO: 1414 - DNA, 774 bp, Mus musculus
gcagaaagtatttttattatgttaaaatgttgcacaatgagcagcaattgtttatgtggaatttgcctagttcatgattacagtctcgattatgcacattccttctagtcatttctgaagtctacgacgtggttagcttgtaaatcctgtctgtttctagccaatcacaggaaagagtgcaggatggacagtgttctcttcagaacttacatccttagaacagttcgaatgctgtctcccgagtgcatcagatcaaaggcttggttaatttggtcgaaggagagattgccggtcacaaattcgtcaacttttatctttttggacatatattcagacaccagctttgggacactctccacactcttccatcctccaaaggcggtgcctttccatgtgcgtcctgtcaccagctggaatggacgagtggagatttcttccccggaagcagctactcccactaccacactgacaccccagcctttgtgggctgcctcaagggctgatctcatgaccttcacgttgccaatgcactcaaaggagtaatccacgcccccatctgtcatctcaacgaggacttcctggatggatttactgaagtcttgggggctaatacattcagaggctccaaattctttggcctttgcgaatttgtctttattgatgtcgataccaatgatccgggatgcaccagccaccttacagcccatgatcactgccagtccaactcctcccaggccatagacggcacaagtagaaccaggctccaccttggca

SEQ ID NO: 1415 - DNA, 580 bp, Mus musculus
tagcagatttacctgcaaaggaaagtctgtttttcacttcatggggactagcacattttccgagtacacagttgtggctgacatctctgttgctaaaatcgatccttcggcccctttggataaagtctgccttctcggctgtggtatttcaactggctacggggctgctgtgaacactgccaaggtggagcctggttctacttgtgccgtctttggcctgggaggagttggactggcagtgatcatgggctgtaaggtggctggtgcatcccggatcattggtatcgacatcaataaagacaaattcgcaaaggccaaagaatttggagcctctgaatgtattagcccccaagacttcagtaaatccatccaggaagtcctcgttgagatgacagatgggggcgtggattactcctttgagtgcattggcaacgtgaaggtcatgagatcagcccttgaggcagcccacaaaggctggggtgtcagtgtggtagtgggagtagctgcttccggggaagaaatctccactcgtccattccagctggtgacaggacgcacatggaaaggcaccgcctttgga

SEQ ID NO: 1416 - DNA, 605 bp, Mus musculus
gactgttaattcaagagtttattaattttaagtaacaataatttaaaaggtacaaaggcttttcatattacaaaaacatctatacaataatcaaggaaactgatcagggttatgtcagttcatgaggaagctagatcacagtaaactacctcagggaacacttgcttttcctgttttggtttgtaagagtcccacgggtgtacccaccactgggctcaaactcacttgtgaattccgtacagccagggctatacagagaaactctgtctcgaagaaaaaaaaaaagtgacactattagggcaaatgtcagaatttactgtaccatcatagcatttgcaaacttcaagataatactgagcattaaaaaaaaaaaaaaagcatagaggtactacctcataaaatgtatagtttaatcgcctgacagcactatgtgtgtgtgtgcaaagtgccaattttatttacaaacttgttaagtagaccctgcatgcctgcaggaagcagtccgacatctttaaacagccctaaacagcatctaaatgtttaaacctgcttgcttgatggtcactgctcctaaaacctggcccagtgctgttagtactttgatg

SEQ ID NO: 1417 - DNA, 582 bp, Mus musculus
tccgcaccccgctcgccaccatcgctgaccagcagcagctgcagttgtcgccgctgaagcgactcaccctggctgacaaggagaacacgcccccgactctcagcagcacccgcgtcctggccagcaaagctgcgaggagaatcttccaggactccgccgagctggaaagtaaagcgcctactaaccccagcgttgaggatgagccgttactgagagaaaacccccgccgcttcgttgtctttcccatcgagtaccatgatatctggcagatgtacaagaaagccgaggcctccttttggactgccgaggaggtggacctttccaaggatattcagcactgggaagctctgaaacccgatgagagacattttatatctcacgttctggctttctttgcagcgagtgatggcatagtcaatgagaacttggtggagcgatttagccaagaagttcaagttacagaggcccgctgtttctatggcttccaaattgccatggaaaacatacactctgaaatgtacagtctccttattgacacttacattaaagatcccaaggaaagagaatatctcttcaatgcta

SEQ ID NO: 1418 - DNA, 796 bp, Mus musculus
caaatgacttagatttaatcattggaagcaaactaaatggaaagcttacaatagaagagatacgtgtcagtgctttttgcaaactgagatgggacagactgggggctgcccctcaacctgatccttcgcaaacaaagatgtccacagtgttcctggaactctggctcaggaaaggggagactgctggttctgtgcatggaagtcaccgtgctcagcactcactcctggccagcatctggagcaccagtttgccggttctggtcatcacccttcttcttgtggccagagacaatgtcatcaatccgcagaagcagaactgcagtctctactgctgttttgtacgtttgtagcttcacagccaatggctcccaaatacccagctctttcatgtccaccaaggtaccagtctcaccattcacaccccaggtctcacaactctcctgtgtgtgcttggcccgaaggaggtaagcagacgaatggtactggccccacaattctggatcaaggtccgagggatgacctctaacgcctgggccacagctctatatggccattgttccacaccagtcatggccttagatttttctgtcaaggcatgagccacagccatctcagaggctccaccaccaggcaccagctgagggtccagtagaacattgcggcacacttgcatggcatcctggaggttgcgttctacttccgagagtatctctttgctggctcctctaagaagaatggtgcaggcctttgggtctttgcagtcagtgatgaatgtaaagtactcatctccaatctt

SEQ ID NO: 1419 - DNA, 590 bp, Mus musculus
tcggctctgcgtcgtgccgccatgatgggccaccgtccagtgctcgtgctcagtcagaacacaaagcgtgaatctggaagaaaagttcagtctggaaatatcaatgctgcaaagacaattgcagacatcatccggacctgcttgggacctaaatctatgatgaagatgcttttggacccaatgggaggcatcgtgatgaccaatgatggcaatgccattcttcgagagattcaagtccagcatcccgcagcaaagtccatgattgaaattagcaggacccaggatgaagaggttggagatgggaccacatcagtaattattcttgcgggagaaatgctctctgtggctgaacacttcctagagcagcagatgcacccaacagtggtgatcagtgcttaccgcatgacactggatgatatgatcagcactctgaagaaaatcagtactcctgttgatgtcaataaccgtgagatgatgttgagcatcatcaatagctctattactacaaaagtcatcagtcggtggtcctccttggcatgcaacattgcactggatgctgttaagactgtgcagtttgaagagaatggcag

SEQ ID NO: 1420 - DNA, 598 bp, Mus musculus
tcggctctgcgtcgtgccgccatgatgggccaccgtccagtgctcgtgctcagtcagaacacaaagcgtgaatctggaagaaaagttcagtctggaaatatcaatgctgcaaagacaattgcagacatcatccggacctgcttgggacctaaatctatgatgaagatgcttttggacccaatgggaggcatcgtgatgaccaatgatggcaatgccattcttcgagagattcaagtccagcatcccgcagcaaagtccatgattgaaattagcaggacccaggatgaagaggttggagatgggaccacatcagtaattattcttgcgggagaaatgctctctgtggctgaacacttcctagagcagcagatgcacccaacagtggtgatcagtgcttaccgcatgacactggatgatatgatcagcactctgaagaaaatcagtactcctgttgatgtcaataaccgtgagatgatgttgagcatcatcaatagctctattactacaaaagtcatcagtcggtggtcctccttggcatgcaacattgcactggatgctgttaagactgtgcagtttgaagagaatggcagaaaggaaa

SEQ ID NO: 1421 - DNA, 734 bp, Mus musculus
caaatgacttagatttaatcattggaagcaaactaaatggaaagcttacaatagaagagatacgtgtcagtgctttttgcaaactgagatgggacagactgggggctgcccctcaacctgatccttcgcaaacaaagatgtccacagtgttcctggaactctggctcaggaaaggggagactgctggttctgtgcatggaagtcaccgtgctcagcactcactcctggccagcatctggagcaccagtttgccggttctggtcatcacccttcttcttgtggccagagacaatgtcatcaatccgcagaagcagaactgcagtctctactgctgttttgtacgtttgtagcttcacagccaatggctcccaaatacccagctctttcatgtccaccaaggtaccagtctcaccattcacaccccaggtctcacaactctcctgtgtgtgcttggcccgaaggaggtaagcagacgaatggtactggccccacaattctggatcaaggtccgagggatgacctctaacgcctgggccacagctctatatggccattgttccacaccagtcatggccttagatttttctgtcaaggcatgagccacagccatctcagaggctccaccaccaggcaccagctgagggtccagtagaacattgcggcacacttgcatggcatcctggaggttgcgttctacttccgagagtatctctttgctggctcctctaagaaga

SEQ ID NO: 1422 - DNA, 590 bp, Mus musculus
  misc_feature (1)..(590): n is a, c, g, or t
tcggctctgcgtcgtgccgccatgatgggccaccgtccagtgctcgtgctcagtcagaacacaaagcgtgaatctggaagaaaagttcagtctggaaatatcaatgctgcaaagacaattgcagacatcatccggacctgcttgggacctaaatctatgatgaagatgcttttggacccaatgggaggcatcgtgatgaccaatgatggcaatgccattcttcgagagattcaagtccagcatcccgcagcaaagtccatgattgaaattagcaggacccaggatgaagaggttggagatgggaccacatcagtaattattcttgcgggagaaatgctctctgtggctgaacacttcctagagcagcagatgcacccaacagtggtgatcagtgcttaccgcatgacactggatgatatgatcagcactctgaagaaaatcagtactcctgttgatgtcaataaccgtgagatgatgttgagcatcatcaatagctctattactacaaaagtcatcagtcnggtggtcctccttggcatgcaacattgcactggatgctgttaagactgtgcagtttgaagagaatggca

SEQ ID NO: 1423 - DNA, 824 bp, Mus musculus
caaatgacttagatttaatcattggaagcaaactaaatggaaagcttacaatagaagagatacgtgtcagtgctttttgcaaactgagatgggacagactgggggctgcccctcaacctgatccttcgcaaacaaagatgtccacagtgttcctggaactctggctcaggaaaggggagactgctggttctgtgcatggaagtcaccgtgctcagcactcactcctggccagcatctggagcaccagtttgccggttctggtcatcacccttcttcttgtggccagagacaatgtcatcaatccgcagaagcagaactgcagtctctactgctgttttgtacgtttgtagcttcacagccaatggctcccaaatacccagctctttcatgtccaccaaggtaccagtctcaccattcacaccccaggtctcacaactctcctgtgtgtgcttggcccgaaggaggtaagcagacgaatggtactggccccacaattctggatcaaggtccgagggatgacctctaacgcctgggccacagctctatatggccattgttccacaccagtcatggccttagatttttctgtcaaggcatgagccacagccatctcagaggctccaccaccaggcaccagctgagggtccagtagaacattgcggcacacttgcatggcatcctggaggttgcgttctacttccgagagtatctctttgctggctcctctaagaagaatggtgcaggcctttgggtctttgcagtcagtgatgaatgtaaagtactcatctccaatcttcttgatttccataagctgccctgtacaa

SEQ ID NO: 1424 - DNA, 590 bp, Mus musculus; identical to SEQ ID NO: 1419

SEQ ID NO: 1425 - DNA, 783 bp, Mus musculus
caaatgacttagatttaatcattggaagcaaactaaatggaaagcttacaatagaagagatacgtgtcagtgctttttgcaaactgagatgggacagactgggggctgcccctcaacctgatccttcgcaaacaaagatgtccacagtgttcctggaactctggctcaggaaaggggagactgctggttctgtgcatggaagtcaccgtgctcagcactcactcctggccagcatctggagcaccagtttgccggttctggtcatcacccttcttcttgtggccagagacaatgtcatcaatccgcagaagcagaactgcagtctctactgctgttttgtacgtttgtagcttcacagccaatggctcccaaatacccagctctttcatgtccaccaaggtaccagtctcaccattcacaccccaggtctcacaactctcctgtgtgtgcttggcccgaagatggtaagcagacgaatggtactggccccacaattctggatcaaggtccgagggatgacctctaacgcctgggccacagctctatatggccattgttccacaccagtcatggccttagatttttctgtcaaggcatgagccacagccatctcagaggctccaccaccaggcaccagctgagggtccagtagaacattgcggcacacttgcatggcatcctggaggttgcgttctacttccgagagtatctctttgctggctcctctaagaagaatggtgcagggctttgggtctttgcagtcagtgatgaatgtaaagtact

SEQ ID NO: 1426 - DNA, 508 bp, Mus musculus
ccatatgaaagtaacaagttaatgcgaccaggctacagcacttatctgcccgggacttaggcctgtacaagcaagggcccgcagctccctctgcaagaagataggtcagctacgaggaccaaataaccggacatgaggctcggtgaagaggggagccgggggagggctgagtcctttcggccttgaccggcaatgggccggcctcgctcctcccagatagtgaggccatcacaggagcagagcggcctggggaacgggaaaaggccggcagagcgtgcaatgaggccacaggccaacctcttcccagaattccctgggatctgggataagggatggcctccccggcccaggtcatcttccccctcaacgataaccaggctgcggccaatcacatcccacaccttcagctgtaaatccgcaatccggaaggtagcacggccaccagcttcagcccggacattgcccagatcgccccggtgccgatcagggacctgaggacccccatgag

SEQ ID NO: 1427 - DNA, 549 bp, Mus musculus
  misc_feature (1)..(549): n is a, c, g, or t
aacagctaggatggcttcgaagtcgggggacggtgggactgtgtgtgcgttggagtttgcagtgcagatgagttgtcagagctgtgtggatgctgtgcacaagaccctgaaaggggtggcaggtgtccagaatgtggacgttcagttggagaaccagatggtgttggtgcagacgactctgcccagccaggaggtacaagcactcctggaaagcacagggaggcaggctgtactcaagggtatgggcagtagccaattacagaatctgggagcagcagtggccattctggagggctgtggctccatacaggggtggtccgcttcctacagctattctttgaactttggttggttggaggaaccatcgacggcctagagcctgggctgcatggactccatgtgcatcagtatggggaccttacgagggactgcaatagctgtggggaccattttaaccctgatggagcatctcatgggggtcctcaggacactgatcggcaccggngagatctgggcaatgtccgggctgaagctggtggccgagctacc

SEQ ID NO: 1428 - DNA, 803 bp, Mus musculus
atcattaaggacaatttactctttattgattaaaaatgaaaaaaaaaaaaccatgcagtaaaatacaagtcaagaggagagggagaaggtaatattttacatcttccaccatccagcaaacattctagaggggctgacctcgctggtatatccttgctctcgccttcagattactcagcagtctcagctggctctaggatttggttgaaaatagagggaaaacacaaaaaacaagaaccaacgcaaatgatttctttaatcatttagaaagaccatttcacatattatcttggctatattggcacatactatcttgtgctatagttagtccctacttcagggacaagggtatcttgagggcttagtgacagtaccccctgaagcactgcttcggctccctggctcccagctgtcccacctcagcagttttccactgactggttcattcaccatcactgcataagccagcagagggaagtcaccacacatcacagagaagtaacattgtcctgggtcttagtgccaacctcctagttgccaaaaaagcaaacaatgaacggaaagagtcccgggacacttttactgtcatgtctgtcccccagagcagggcaaaggtgatgacggtctagagaatgtgaacaggagatgggctgtgcttacttccagcctggcactggaccaccccaaatcaaaagccacaacagtgatagcaaattccttcctgagcctgtaagtgcattaagtcaagctgctgaaaccaaactggattctacagcaagacacgagtcttctgcaaaggtaac

SEQ ID NO: 1429 - DNA, 578 bp, Mus musculus
cgcggcgaggtgacctgagagcccggagcgtgaggagcacggagccaggcgctgcagccgtcatgtccgaggactcgagcgccctgccctggtccatcaacagggacgactacgagctgcaggaggtgatagggagtggagcaactgccgtggtccaagcagcttactgtgcccccaaaaaggagagagtggcgatcaagcggataaacctggagaagtgtcagaccagcatggatgagctcctgaaagaaatccaggctatgagccaatgccatcatcctaacattgtgtcttactacacatcttttgtggtaaaggatgagctgtggctcgtcatgaagctgctaagtggaggttctgttctggatattattaaacacattgtggcaaagggggaacataagagtggagttctggacgagccaaccattgctacaatcctccgagaagtcttagaaggactggagtacctgcataagaatgggcagattcacagagatgtgaaagctggaaacattcttctaggagaagacggctctgtgcagattgcagatttcggcgtcagtgcttttttagcc

SEQ ID NO: 1430 - DNA, 806 bp, Mus musculus
attgcacatcactcctttattatactgatctggaaagagacttagttgttacgcccaaacgagctctgaacccacacggtagggtcaagcagctggaacatgattcagacagtgaaagacaaaaactcggacatgatccaggggtacttcacctctacaaaacaaggccaagggatccaaacacagcaagaggtacaaggagtttatcccactgatatgaggaatggcttattttctggtgaccacacaggactgtttcaaatgtcactagcaacctcagagttgcttttgtgtgctgataatatgtatatatacttttttttgtaaaagtaagtgtaacatagacttgacaagattgatcccaaccttctagggccagcagctcctttagggtcagagagaaattagggttaaaaatcaccatgaggttacttccactctccactggaatgactatgcccccagttacctaactgcaggaagagtgcaggacaggttccagggacaaaactggactgcagcttttcattggtcacaccacagcacagttcctccctgaattcttcctaagcagacccttagtaaacaaagacctaagaaaaactatagttactatctctcaactctcctggtacagggagctgtccctcgatgtggtcgagatactgcacccccagaggcgttattctgactagattctatgaagggagtgggtgcaggggataaaatactacaatgaaaacgggagccacagccaccaatctgcagctacaacttaaactttaaatctaaagacatagtcagtg

SEQ ID NO: 1431 - DNA, 584 bp, Mus musculus
tctgcccgtcgccatggctgcctacaagctggtgctgatccggcatggcgagagcgcctggaacctggagaaccgcttcagcggctggtacgacgccgacctgagcccggcgggccacgaggaggcgaagcgcggcgggcaggcgttgcgagatgctggctatgaatttgacatctgcttcacctctgtgcagaagagagcaatccggaccctctggacagtcctggatgccattgaccagatgtggttgccagtggtcaggacttggcgcctcaatgagcgacactatggcggtctgacaggtctcaacaaagcagaaactgctgctaagcatggtgaggcccaggtaaagatctggagacgatcttatgatgtcccaccgcctcccatggagcctgatcaccccttctacagcaacatcagcaaggatcgcaggtacgcagaccttactgaagaccagctcccctcctgtgagagcctgaaggacactattgccagagcactgcccttctggaatgaagaaattgtcccccagatcaaagaggggaaaagggtcttgattgccgcccacggcaacagccttc

SEQ ID NO: 1432 - DNA, 724 bp, Mus musculus
gaaaatgccacatagatctttattgaacaccagtgccagcaccagcctccttctctgtagtcacaggggcacacgggcaaggggtgctctcccctggccgggaggagtgaaagattagccctgccccgggacctgctctcttaaggccagcaccctcctgggtgtcagcgcactacttcaaaggacagcaacctcctgggtgttcagcactggtggctcaagtctgctcaaactcctgctcacagtagcctacactgatgggctgggcctggattcctctcctcaccagctcacaacggaaatgcgacaaacgtttaaaggcaaagtctatattagttgtcaggttactgctccacagtctctcagcgacggcacccgctctgggccagagtctggggaccaggttggtgctgtccacatactctccccacatacaggcctcccctccaatgaccagagccttctgttcaggcgtaccatgaaacgccaggggctccactttgtacatgtccttccagtcagggccatactttacacggttcaggtaccagggagcagacagcagggcccggaagccagccctggtgatatcttgcatctccaacatgtactctactgggatttcttcccggcacacctgtatgattgtatctggccgaaccttcactttattatcaaatacctcctgccacaccacatagcccttgtcataatcagagacgat

SEQ ID NO: 1433 - DNA, 573 bp, Mus musculus
tgctggaagtccaaccccaacatccaggccttcatgaagaaaaagggctttactgacttcaagcagctggagtccttctacatccagacgctgctggacatcgtctctgattatgacaagggctatgtggtgtggcaggaggtatttgataataaagtgaaggttcggccagatacaatcatacaggtgtggcgggaagaaatgccagtagagtacatgttggagatgcaagatatcaccagggctggcttccgggccctgctgtctgctccctggtacctgaaccgtgtaaagtatggccctgactggaaggacatgtacaaagtggagcccctggcggttcatggtacgcctgaacagaaggctctggtcattggaggggaggcctgtatgtggggagagtatgtggacagcaccaacctggtccccagactctggcccagagcgggtgccgtcgctgagagactgtggagcagtaacctgacaactaatatagactttgcctttaaacgtttgtcgcatttccgttgtgagctggtgaggagaggaatccaggcccagcccatcagtgta

SEQ ID NO: 1434 - DNA, 774 bp, Mus musculus
ctcttcctctttctcttccttttcttcagcctcatcatcactgacttccttatctcgttccttctccacaaagagagtaatgggatagccaatgaactgagaatgcttcttcacgatctcctttattctcctttcctccaaatactctgtttggtcttctttcagatgcaagataacctttgttccacgacccattggttcacctgtgtcagtcctcactgtgaaggatcccccagctgaggactcccaggcatactgctcatcgtcgttatgcttcgtgatgacagtcactttctcagcaaccaaataggcagagtaaaaaccaacaccaaactggccaatcatagagatatctgcaccagcctgcaaagcctccatgaaggctttggtgcccgacttggcaatggtgccaaggttattgatcaagtcggccttggtcattccaatcccggtatccacaatggtcagggttcggtcctgtttgctgggaatgagattgatgtgcagctccttccccgagtccagtttactggggtccgtcagctctcgtaacggattttatccagagcgtccgatgaattggagatgagctccctcagaaagatctctttgttcgagtagaaggtattgatgatcaaggacattaactgggcaatttctgcctgaaacgaaaggtctcgacctcctcctcctccattggttggtcttgggtctggggttcctcaggcatcgtggctgaatgaacacgcacgagacgtgacgctccgcaccagg

SEQ ID NO: 1435 - DNA, 582 bp, Mus musculus
tcctggtgcggagcgtcacgtctcgtgcgtgttcattcagccacgatgcctgaggaaacccagacccaagaccaaccaatggaggaggaggaggtcgagacctttgcctttcaggcagaaattgcccagttaatgtccttgatcatcaataccttctactcgaacaaagagatctttctgagggagctcatctccaattcatcggacgctctggataaaatccgttacgagagcctgacggaccccagtaaactggactcggggaaggagctgcacatcaatctcattcccagcaaacaggaccgaaccctgaccattgtggataccgggattggaatgaccaaggccgacttgatcaataaccttggcaccattgccaagtcgggcaccaaagccttcatggaggctttgcaggctggtgcagatatctctatgattggccagtttggtgttggtttttactctgcctatttggttgctgagaaagtgactgtcatcacgaagcataacgacgatgagcagtatgcctgggagtcctcagctgggggatccttcacagtgaggactgacacaggtgaacca

SEQ ID NO: 1436 - DNA, 760 bp, Mus musculus
cactctcaatctctcttttttaatgcaaacactaaacttctcttcctttggatacagcagagaaattcaaagaaggaacaaacaagaagtacgtgttagagaagggcctgtggggagcaccaggtgagctgttcacgccctgagtaactccatagctgagctgtgctcacagggagaaaggacattataaacacagaaatgttacaaaccagacaagccccccacttccctgtggagaagcaagcactaaatcacacttgaacatccgagtaacattaaaaactgtagttaaacagctactgaacttaagggtgtggcaggaaaggcccctcctctgttggcccaggttggtgaaatgctttgggtgtgagctaaaagatcagcaagagaggagcagtgctgagggacagtgctgagccacgcccagagctaagaaccaggcacagagggtgtgagcagacaaggggccaggcacagctcacagaaggctctggtctgactgtcaatggcaggactgttagctctgcagagctgggacaacattaggtggataccatccaccgctttccccacagagtggatggacagggcactgggctcaggccctcaatcttcacgcaggtaggcctcctcttcctggtcagccccctcatcactcacttcctgtgctttctggtgcagctcttttgtctgtgcttcaggcaacttggtttctgccttctgggagagctggcgcacctcctgtacctgtgacttcacc

SEQ ID NO: 1437 - DNA, 567 bp, Mus musculus
gatgacttcaaaacagcaggaatatttgaagttggagaccacttggatgacagcggttggcctttcagagatggctgctgaggctgcctatcaaactggagcagatcaggcctccataactgccaggaatcacatccagttggtgaagtcacaggtacaggaggtgcgccagctctcccagaaggcagaaaccaagttggctgaagcacagacaaaagagctgcaccagaaagcacaggaagtgagtgatgagggggctgaccaggaagaggaggcctacctgcgtgaagattgagggcctgagcccagtgccctgtccatccactctgtggggaaagcggtggatggtatccacctaatgttgtcccagctctgcagagctaacagtcctgccattgacagtcagaccagagccttctgtgagctgtgcctggccccttgtctgctcacaccctctgtgcctggttcttagctctgggcgtggctcagcactgtccctcagcactgctcctctcttgctgatcttttagctcacacccaaagcatttcaccaacctgggccaacag

SEQ ID NO: 1438 - DNA, 735 bp, Mus musculus
  misc_feature (1)..(735): n is a, c, g, or t
gtttccacagtttattacaaatccatcgaacagtctggaatgtatggagttagagagaaagatgaggaaaaatggttgactagcaaaaactaagggtaagtataatcttaatttattgtcaccctgaagatgtcacctcctctgccgtttgggtttctgaggggctttcatcttcttcctgaaatttttctttttcttgatgatacttttcacatctctgttgtgcagccagtcatctcgctcagcttcccacttgagctgtttgaaacttgcattatctctgttagccatggcgttcatgccaatagtatcaaacttggagcccatattctcatccagcagatggccaaactcctcagcagagacaaacaggctggagtcattgaaacttttcttctttttcttttgtccttgaaatgacccagcaaagtcaaaatcatcttcactctttctcttgcttttcttagtattggctttggggttggcgtcacanaattctggagcatcttcactttcatcatctgacacatccatgaacgttcctccatcttcatcaatctcaaagtcttcatcgttcatacttccgagagaaacttcatcgtcatccaggtctccaagttcgccgtcactactctctgagtcttccaagtcagccttagctccttttgcttttttcatattgctggcaaaatcaatatcatccttcccaggtgggaagcagttgtcgtcttcaaa

SEQ ID NO: 1439 - DNA, 593 bp, Mus musculus
tttgaatttctagagagacaaacaatgttactcaggcctggaggcaagtggtacgacatggagtacagcggtgagtattccttggagctgcagcctccagatgtcgtgtccaagtacaaagccctggcccagaagctgtatgagcacgaagtcagcttattcaagagtaagacaaacaatcaaaagggaggctcttccacctggatgaaggccatcgtgtcatcagggacactagctgacaggatggcggccatgatccttctaatccaggatgatgctgtccacactctgcagtttgtagaaaccctgatgagccttgtgaaaaagaagggcagcaagcagcagtgcctcatggcgttggacacgttcaaggagttgctcatcacagaccttctgccagacagtcggaagctccgggttttcagccagcatcctttccacaaactggaagagttgtccagtggcaacaaggactcgagagatagaagactgatactgtggtattatgaacaccaattgaaacacttggtagcagaattcgtccaggtcctcgagactttaagtcatgattccttggtaaccactaaaacgcg

SEQ ID NO: 1440 - DNA, 835 bp, Mus musculus
actttttaagatattaatttatttgagttcagatatttttaaaatataaaaactggttgtatttttttaaaaatataattcttgtagacattctgtgggtaaaaatttgattgtccatattaaaaagttactgatggtttgcaattcagcaatgtacaaataaagactctttcagaaggtggcatctgggttcctaattgtaggaaggagctgcttatctcaggcaggtggaatataaagcctttggcctctgctgattcttaaaccaggaggggattcatacccatggagacagccaattgtacaagacttttttgtctttgtgtcctaggcatgaacccagggcgtcacaaatacggaatatgtatattatctctaagtgacactccctagcccttctattacattaagttgctgactgtaattttttttctttaaaacaaaattctctgtgtatcaccattctgcctgatgtatgcctgtacttcatgtgtgcccggtgtcctcagaacccagaagagggcattgattctctggaactgaagttacaggtggttgtgattcaccatgcgactgagaatcaagccgaggtcctaagccaagtgcagagacgtcatcccagccctaacactaacttcttgcttatacacttacctagtttctaacctcaaacttaagacagaaaactcaatgctcctctggtatctgggcacagaaaaggaagagtgggaacacaagggtgaagtgacatttgcttacctgctacaggaccaccgagtaagcagaaggacattctggatctttatagctttgctcacatgcatgagcgaggaga

SEQ ID NO: 1441 - DNA, 567 bp, Mus musculus
gtgcgccaccacaacgcgtttagtccctttcataaagaccggaggaacagacgtttacggccagctcccgaaaccaagtgaactggaggccaccctgcaccaagggttggaaccttttcacaaaatccacgctcctaatacaaggcaactctgaaccagtgcaatggcagacagggatgccaccctgtgggcttctcatgagaagatgttgtcgcagcccctcaaggacagtgatgccgaggtttacagcatcattaaaaaggagagcaaccggcagagggtcggattagagctgattgcctcggagaattttgccagccgagctgtgttggaggccctgggatcttgcttaaataacaaatactctgagggatatccaggccaaaggtattatggcgggaccgagttcatcgatgagctggagatgctgtgtcagaagcgtgcattacaggcctaccatctggatcctcagtgctggggtgtcaatgtccagccttattcaggctcccctgcaaactttgctgtgtatactgccctggtagagcctcatgggcgaatcatgggctt

SEQ ID NO: 1442 - DNA, 694 bp, Mus musculus
gtttgtaaatttcttaagtttattttaatataaatttattgaagtcactttggacccagcatatccttgggtttcacccactcatcaaactgctctgctgtgagatagccaagttcaatagccgtttcctttaaggttgatccgttcttgtgtgcggtcttggcaatctttgctgctttgtcataccctatatgtggattaagagctgtgaccaacattaaagactcattcattagcttgttgatccgctctgtgttggcctggatcccgaccacacagttgtctgtgaaggacactgaagcatctcccagtagcctggctgagtgcagcacattcttaatcatcattggtttaaacacattcagttcaaaatgtccattgctgcctccaacggtaacagcaacgtgattccccatgacttgggctgcaaccatggtcatcgcttcacactgagtagggttcacctttcctggcatgatgctgctccctggctcgttttcaggcaagatcagctctcccaaacctgaccgaggaccagaacccaggaagcgaatatcattcgctatcttcattagactgcaggcggcagtgttcatggctccactaagctcaaccagagcatcatgagcagccagagcttcaaacttattcggggcagtgacaaaaggcaaacctgtgagtgctgctacttttg

SEQ ID NO: 1443 - DNA, 581 bp, Mus musculus
cgcactccgtctcctcgcgcgctcgcgtcgcctcctgcgggttccgtccgccggtgctgcagtgtctggggaagcgaccaccctcccgcggtgtgctccgaacgtcgcgcgaatggcaagccaaaattccttccgtgtagagttcgacacctttggtgaattgaaggttccaaccgataagtattatggtgctcagaccgtaagatctacgatgaactttaagattggaggtgctacggaacgtatgccaatcccagtcattcaagctttcggcatcttgaagcgagctgctgctgaagtaaaccaggagtatggtctcgatccaaagattgctagtgcaataatgaaggccgcagatgaggtagctgaaggtaaattaaatgatcactttcctctggtggtttggcagactggatcaggaacccagacaaacatgaatgtaaatgaagtcattagcaacagagcaattgaaatgttaggaggtgaacttggcagcaagaagcctgtgcaccccaatgatcatgttaacaaaagccagagctcgaatgacacctttcccacagcaatgcatattgctgctg

SEQ ID NO: 1444 - DNA, 734 bp, Mus musculus
gcacacatgacagacattttattaagtttcttctacacaatacagtaagttcaattgagaggccaaacggatccaaggaagataaaaattaaatacttaaattaatcaaaaggcactgcgacaccacctaaacccaccacctcagaggtagtaggctaaggaaggtcgtgctacagcaagttacctaatgtgaatgttagcagttacatagcaagaagcaagtctgtattaccgaagatattgttacaatgatcactgagtccaagatatttggccaggaaagggtcacaatagctaaaggtaaagccaactggaaaggaataggtgtagagaatccaagcgagatagagaagagttaaatagcaatggatcaggcttcttcctcccaaaacctaattactgcattgagctacctgcccctgccttacaggatgctcaactatgtttaaggatgctcagggttcttgctgcagacctctgaaaatgtattacacatgggctggctttgttgctagttattctgaatgacgaaaaccccaaagcgttcacatgcaatggagtatgagctttgccaatcacgtcctaaggaccttgtggaatactctcttaacagtctatacacctttcaagagctgagctcaacttaaagctgcaaggttcacaaaataaacaagaaagccaggatacaacaatgcaggttgaacatcctagcagctaatagcaatctgtctttc

SEQ ID NO: 1445 - DNA, 595 bp, Mus musculus
aaaatcttcagcgggagctcccaccaggacttatcccagaaaatcgctgaccgcctgggccttgagctaggcaaggtggtgactaagaaattcagcaaccaggagacctgtgtggaaattggcgaaagcgttcgtggagaagatgtctacattgttcaaagtgggtgtggtgagataaatgacaatctaatggagcttttgatcatgattaatgcttgtaagatcgcttcagccagccgggttactgcagtcatcccatgcttcccttacgcccgccaagataagaaggataagagccgggctccaatctcagctaagcttgttgcaaatatgctatctgtagcaggtgcagatcatattatcaccatggatctacatgcatctcaaattcagggtttctttgatatcccggtggacaatttatatgcagagccagctgtcctaaagtggatacgggagaatatatctgagtggagaaactgtactattgtctcacctgatgctggtggagccaaaagagtgacctccattgcagaccggctgaatgtggattttgctttgattcacaaggaacggaagaaggccaatgaagtgg

SEQ ID NO: 1446 - DNA, 732 bp, Mus musculus
gaaggagggaaggtttattttggtttctggtttcaccatggtcacctggctctatcgcttctggtccgcttcaaagtgcagcctcccaggtgggccagcatgctggaactcaactgctccccccctccccttcagccaggaagcagagaggaagcaagaggaagttatttggggcaacacacccttccagggcatgtccctgataatagacttcctctaacacagtcccactccctttatgttcctgtttccagaggccattgaagctgcgagtttatcatggattgatccattgatggggtcagggcccttgtggtcccattaccagaggtcccacctctgaacactgctgcatgggaaccaagtccttgacaggtgagcttctttctgggtgacatttcagatgagatcaggcacatttggggtggtatggctctagacaggtgaggacatttggatctaagctgtaatggacatgtcttccatctttgttcctttttgttatttccccttttttcacttttaactaagtgtttcctgagcccctgttgggtgctgatgctgacctaggtgcagggaggcagcagggaggttggaggggctttggagttcctgccagaatacagggctggtcctgcaggagacagagcagagccggagctgagaaatgaatggcaagagcactttcactgggtgacggctcagcagggaatggagaaaccccgtgaagct

SEQ ID NO: 1447 - DNA, 590 bp, Mus musculus
atcctcctcatggccttccctgtcacctccatcttccatactttctcccgctcttacctggagctcaagcaggaacaagaacgggtgctgatccgccgggctcagtacctcatcaaaaccaagtcacagctcagtggcatgtcccaggacagtgacatcttgtttggaagtgcctcttcagacactagggacaacaactgaggcgagaagacaaccctgccctgcctgccagctgcggcttcatgcaaccaccgccattggagcctggaaaaggacttagtactttcaagtccagccctggcccgggactgacctgagcgagccacagcacggaaaggatatgtgccacatcacagagtccctgtcctccctctaagcccagaagtaacagggaagctagctggagccagtgcctcacccaccccgggcctcaaagccgattttctccctaagaagccgattggcccagtcctaccatgtaaacaacattcccagcaaaacctgcatatgctggggcactgcctggaggaaaacagacagcaggtagccacacgtgactttagtgtgtccacctaaggaagaaagagcct

SEQ ID NO: 1448 - DNA, 817 bp, Mus musculus
gagaaatctttttattagaagatgtcccagaaggcaacagtttaaaatcaagcaattaatgattacaactaaatacaaaatttcaggtaaatgcacctttcaaaataaaccagacccttgcaacaggagggtttttgttttttgtttttcttatacaaaaacagttaacaccactttgcaaaaaagcatacaaaaatacagtattaaaaaaaaaagcaaaaacaaaaacaaaagacgcccacagcatacaaccccgcagcagcttataaaacacaagccattcagatgagactttagcctgttcaccacttgtcctcccaagatagttccaggagtcccttggtgcctagaagtcctgccccaacaggtaccacagcaacttccgaagcttcctctaggacttgaggccaggaagtaattggaggccatcacagttgggagccaatttggaagtggtagctggtttttgagagccacatgttgttacttactgtctgtcccccacactgtacccctacttccaagcccagggccagcaggaacagatctgctttcctgggtagagttctggaaaggctggctcttctttcaggcaaagcttaggatctcctgaaagatgctcacgtgacggctgctagcttggtgactttcccaggatagagggctgtactttgattccacagggagttgcagaacacagctggagcaaactctccttgttggctgagtagcgttcctagaggtacactgacaacccacaggaagtaagtttaccttctgggggcatcaggtgattgccagcggtgcccctctgaat

SEQ ID NO: 1449 - DNA, 572 bp, Mus musculus
aggcctgctccgggtccgagagccccagcgattctgaaggtgaagagattgacgtggtgaccgtggagaagaggcgatctctggacatccgaaagccagtcaccatcacggtgcgagcagaccccctggacccctgcatgaagcacttccatatctctatccaccaacagcagcataactatgctgcccgttttcctccagaaagttgctctcaagagggggatcctgagccaggtccccaggaagaggctccggagatagaagctcccaaggagaaagaggaggaggaagaggaagaggaggaagaagagattgtgagccccccacctgtcggaagtgaggctccccagtcctgccaccccaaacctgtcagttctgacactgaggacgtgaccaagaggaagaaccataacttcttggaacgaaaaaggaggaatgacctccgctcccggttcctagccctgcgggaccaggttcccaccctggccagctgctctaaggcccccaaagtcgtgatcctcagcaaggcgttagaatacttgcaggctttggtgggggctgaaaagaaaatg

SEQ ID NO: 1450 - DNA, 836 bp, Mus musculus
actacaaccaaagagattcaacatttattttatcataaaagtccagcaaataaaactatgtacaaggtccatgcaaagaatacaattacacacaagacacacttaaaacctgattaaaacacaatctccacaatagcagggaataaaaccagtaagaccaagtatctttagtgagaaacataatcatgtttatattttggatgctgcttgaatccaattctctccccaacaatgaggcactggaccacccattcttgtgataccacaggcagttgcaaggcttcagcacacttgagcaccgaggctgggcatgaggggtctgtcaccaccacatcaaatacccctaaagcaatgtctttgttgtgggcacttgaatggtgctgcttcacagaggctgcccctccagtcataaggatctcagaccagagctccaagaagttctgttgttgatctgacaccaagaggaccttcagattctggaaagggttttcacggggttgccaatccagaattcgttgctcttcaaggctatacccagcaggcagcagataattacgatagttttgaagttggttggcatggcaactgtcatggacccagacatgagacacacaaggaatgccactggcaaggcacaggaagtacttccgggttcgacagtgctggtccgcaattaggagacactggtaggctgtgttacactgggcttcattgaagtcttcaaggatatacccagctcctgctcgaagctggcattctgtatactgcttgttgaaaggaggtatttctaaatattcctgctcttcttcactgcttcctgtaagaccatctagcag

SEQ ID NO: 1451 - DNA, 553 bp, Mus musculus
  misc_feature (1)..(553): n is a, c, g, or t
tggagagaaacctgccagtgctcccgtggacgacacagagtccctccacagccagggggaagaggaatttgaaatgccccagcctccgcatggccatgtcttgcatcgccacatgagaaccattcgagaagtccgtacactcgtcacccgcgtcatcacagatgtttattatgtggatgggacagaagtggaaaggaaagtaacggaggagactgaagaaccaatcgtagagtgtcaggaatgtgaaacagaagtttccctttcacagactggaggttcctctggggacctgggggacatcagctccttctcctccaaagcttccagctcacaccacacatccagtggaacaagtctctcagccatacacagcagtggcagctcagggcgaggagctgggccactcaaaggaaaagccagtgggaccgaagctgcagattttgccttacccagttcccgaggaggcccaggaaaactgagtcctagaaaagggatcagtcagacaggggcanccggtgtgtgaggaagatggtgatgcaggccttggcatcag

SEQ ID NO: 1452 - DNA, 843 bp, Mus musculus
gccattttaaatagttttattataccatgctacttactttgggtccccgtggaacaaaagcaacaccttcttggactggcttaatccacctcttcaatggtggggcctgaagaagcaccaccagatgggggagctcctcccacctgggaagccaccaggcattcccccaggcatgccacctgcactctggtacacttggtaatgatagggttgcagactttctccagttctttctgctgatgctcaaattcttccttctctgcagtctggttcttatccagccagctgatgatttcattgcacttgtcaagaatcttctgtttgtcctcatcattgatcttgccttgaagtttctcatcttccacagttgctttcatgttgaaggcataggactccagtgagttcttggaggaaaccttatctctctgcttctcatcctcagccttgtacttctcagcttcttggaccatgcgctcaatatcttccttactcaagcggcccttgtcattggtgatggtgatcttgttctcctttcctgtgctcttatctacagcagaaacattgaggatgccattggcatcgatgtcaaaagtaacctcaatctgagggaccccacggggtgctggagggatgcctgtgagccgaactttcaagcaggttgttgtcttggtcatggcctttcaccttcatacacctgaatgagtacaccaggctggttgtcagagtaggtggtgaaagtctgtgtctgcttggtggggatggtggtattgcgcttgatgaggacagtcatgactccgccagcagtttcaataccaagggaaagaggagtgacatccaagagca

SEQ ID NO: 1453 - DNA, 570 bp, Mus musculus
gggatgcggccaagaatcaggttgcaatgaaccccaccaacacagtttttgatgccaaacgtctgatcgggcgtaggtttgatgatgctgttgttcagtctgatatgaagcactggcccttcatggtggtgaatgatgcaggcaggcccaaggtccaagtggaatacaaaggggagacaaaaagtttctacccagaggaagtgtcctccatggttctgacaaagatgaaggaaattgcagaagcgtacctcggaaagaccgttaccaacgctgtggtcacagtgcccgcttacttcaatgactctcagcgacaggcaacaaaagatgctggaactattgctggcctcaatgtacttcgaatcatcaatgaaccaactgctgctgctattgcttacggcttagataagaaggtcggagctgaaaggaatgtgctcatttttgacttgggaggtggcacttttgatgtgtcaatcctcactattgaggatggaatttttgaggtcaaatcaacagctggagacacccacttaggtggagaagattttgacaaccgaatggtcaatcatttca

SEQ ID NO: 1454 - DNA, 780 bp, Mus musculus
catttcaaaaagattttatttccaaattaagacttgtaagaaagcaagccaggtgccccctgcttctggttgtgattgaattatcggcacaacgaaccatactgaacccatttaaaaactatcatgagaacaaagaccataaagaccctagagaggaaagagaaccacttgggtccttgacatttctgcttctacacaggcactggatcacctagaatcttaagtgaaaatttaacaatgtccagtggcttctcagatgttcccaggagccttttctaagctgcttaactccaaatctgattccatgatttccatgaccagaatcctagaacgtggccaatgttcagcagcacattcttacggctaagacagagcatccactagaccactctaaagttatatggagtcaagctttatcatttgtcataaactccatagcatgggttatttttccatttccatgggaggacactgagttcactcaccacaagacaagacagtctttggttatatagagataagtaagtgtaaactggcagcattaacacattttttggtaaccggtgtaggtattgccaaatagtatgtgacaggaccagttaaaacactgtaatacttacactgaggataaaagtgtcaaagaatggttatatatatatgaaaaaaatttacatgtacatacacacatctctcattattgatcaatataagaggaggaaattaggacaatgtagtgtattagaatttattagaatcgtagatccagctacaagaacatgt

SEQ ID NO: 1455 - DNA, 630 bp, Mus musculus
caagtgttcttagaccgtattaacagggctgactactgccctgagtgttaccctgacaatcctgctaatagaagccttgttctgccttggtctttcccacttgagtgggcacctcaaaatcttaccaggtggacctttgaaaaagcttgccatccatttcttctgggccctccactggttagaaaaaagatacatgactccagggtagctggctttaatcctgcattacaattaattttgtccagaacagacaaaaccttaaacaagaaacttggccaaagcaaatgacttctgtaacagaatcatggagactctcaagggctttgcgttcgtagcctaggggagaagaggaattaacgtgtttctgttttccttctctttttctttcttataattttttaaggtgctggggattgaatctgggtgccttgtgcatgctaggcaagtgctcttccactaagttaaaccaaggctccccctttctaagactgactcagactgctgttactactctgtcaactgcctaaattgttgggtctgcttctgtggtctatgcatattttagcataaatttagttgatattgcagccagagtatttacctagaaccagactaacctatagcccctat

SEQ ID NO: 1456 - DNA, 828 bp, Mus musculus
cacttgaatatacttttattctatgattgcaccactagcaacatgatagactttcacaaatcataaagcacacactatttaaaatattttgctgttcacaatttgaatgtagcattattactgtttggtactaggctcaaagacgacattttgattcctcagccttcggctgtctgctgatgtcaaaacgagtgtctagtcacgcagaggagagaaactcaaaagcggtctccttttcctcggtcagctcctttgctgtcaggtccatcttttcacgggagaagtcattaatggggaggccttcaacaaacttccaggtcttattcttgatcacgacagggaatgagtagagcaggtcatcagggacaccataggagttgccatcagagataacacccatcgacacgaactctccctctggggttccaaaccagatgtctctgatgtggtctgcgatggctttcgcagcagacattgcactggacagcttccgagccttgatgacagcagcaccacgctgttgcacagtcgtgatgaactctcccttcagccagctgtcgtctttcagggcttcatacacaccgacttcctttccttgcagtttcaccttggcatgattgacatctggatactgggtcgatgaatgatttccccagataatgacattctttacatcatcagcggttacaccgagtttaagagcaatttgagattttgctcggttgtggtccaagcgagtcaggcaactgaaattctccttggggatcgatggcgctgacttggaggctgtcaggcagttcgtattggctgggtttccacaacaatgac

SEQ ID NO: 1457 - DNA, 628 bp, Mus musculus
  misc_feature (1)..(628): n is a, c, g, t
gtgacctgactgctggagactgccttttgcaggtgcagagatcggccttgcagtttgcaataatgtctgaaccaatcagagtccttgtgactggagcagctggtcaaatcgcatattcactgttgtacagtattggaaatggatctgtctttgggaaagaccagcccatcattcttgtgctgttggacatcacccccatgatgggtgttctggacggtgtcctgatggaactgcaagactgtgcccttccccttctgcaggatgtcattgcaacggacaaagaagagattgccttcaaagacctggatgtggctgtcctagtgggctccatgccaagaagggaaggcatggagaggaaggacctactgaaagccaatgtgaaaatcttcaaatcccagggcacagccttggagaaatacgccaagaaatcagttaaggtcattgttgtgggaaacccagccaatacgaactgcctgacagcctccaagtcagcgccatcgatccccaaggagaatttcagttgcctgactcgcttggaccacaaccgagcaaaatctcaaattgctcttaanactcggtgtaaccgctgatgatgtaaagaatgtcattatctggggaaatcattcat

SEQ ID NO: 1458 - DNA, 769 bp, Mus musculus
aacattagagcataatttatttttttttttacttaatttacacaagaacttaaaataaatgaagacattccataatgtcagtaagcaactttccaaaccttcatgactttccttcttcaaatacacacgttgacaaacagaatagattagatgcagtctacttttttttcggttggctcattgtgtaaagaattagaaaccatgaaactaaattgtgtaaatgttggaagtttgttgcaagcagcaccataacttccgttcacactggcacatatgaccgctccaaagaagtttggatagtatttctgaattcttaaaatcactttttggcaagctatggctgggtcatctcctcctctcatatattctacagcttggtagctcggcagaaagcgcaggagtgtgtcaccatcgccagtggctgcagctgctccagccgtgtcatcagcataggctccggctccagggattggtgaatccctacacgaccaggtattttgaattttataccatttgtggatgtgccagcagcagtatgtcccgtcttatggattacaaccatgccaatagtatcatggctgtggatatccattcttctttgtggggaaaatactctgctttaagaaccagatggtttgtagggtcccagtattttgagggatctggaataacatttctccaataatttggctggcaatttcgagaaagccaatctgaatgaagatctcttgaggttttggtagacaagtcctcattagtaaaccccata

SEQ ID NO: 1459 - DNA, 508 bp, Mus musculus
tcagctatggagcggaagtcgaatctgtctctgcttctcctactgctggtcctgggcatgcccctggtgcggggctccggccctctgcccctggtcgtcaacacttggccttttaagaatgccactgaagcagcgtggtggacattgctatctggaggttctgccctggatgcagtggagaacggctgtgctgtgtgtgagaaggagcagtgtgatgggactgtaggctttggaggaagtcctgatgaaggtggcgaaaccaccctggatgccatgataatggatggcactgccatggatgtgggagcagtgggaggccttagaagaattaaaaacgcgattggcgtggcgcggagagtcctggagcataccacacacacgcttttagtgggggactcagccaccaagtttgctgaaagtatggggtttactaatgaggacttgtctaccaaaacctcaagagatcttcattcagattggctttctcgaaattgccagccaaattatt

SEQ ID NO: 1460 - DNA, 756 bp, Mus musculus
gcacaattctgtgataaaaacaaaaactggaatacaaggttatgaggtttctgaatgggaaaagctgaccccatcaactgaaataaaaagattctcatacacaagagaggaactcggggagaacagggtaaatgtggaaaggcagggctaaacgcatccaagggacttgttatctcagaactcttcaaacacaaaattaggattcttgactctcaaaaggctgaagagactgagcttcagggctacagggaaagaaaccgccagaaacaaaccaccttctccctagggatctaatacagggtcttcttttgacccgagagaatacaaagctcttccggcctcttctagccgctgtcggtattcgagcttctcgtagttggcgggatttacgcctttaaagccgtacataactccccaccagcagccagcaatggcggccgtggaatcactgtctccaccgtggaagaaggctttgtgtgcgagctccttccaggaatcccccgcggccaggagggcatcgtaggcaatcatgggggcatcgtgtccgctgctgccaccccagcccgagtagctcacgtcgatgtagaactgatccctttccttcacaccaaagggctgcgggaagacgggagccgagttgccgtccaaaattcctctaagctccaggtacttttcccattctttctcgaagtaggaccagtgttgaagattctccttcacaaagtagcctgactgagtgatgtactttttggcttc

SEQ ID NO: 1461 - DNA, 522 bp, Mus musculus
ttgccccataagcccgcctgtgccaagctcagcatgggtggggggctgattgagaggtatgtggctgccatggtgctgagcgcggctggagataccttgggctacttcaacgggaagtgggagttcattcgggatggggagacgatacaccagcagttggcccagatgggtgacttggaagccatagatgtggcacgatggagagtcagtgatgataccgtcatgcacctggccacagcggaggccctcatggaagccggccagtccccggatttgcctcggctgtattccctactagccaaacattaccgggactgcatgggagacatggatggccgggcaccaggtggtgcttgcatgcagaacgccatgctgctacagcccaacagggccgacggctataggattcccttcaacagtcacgagggtggctgcggggctgccatgcgcgccatgtgcatcgggctgaggttcccccaccccagccaactggatctgctgatccaagtgagcatcgagagc

SEQ ID NO: 1462 - DNA, 754 bp, Mus musculus
atcttaaatgtttattacatatgctgtacttagggagactccagctgtttgacaccagagttgacaggcacactcagcacggactgggttaagccaatgctcgcttctccttgtaggtcgccatcatcttcttgatttccgcaatcgctttccccggattcagacccttggggcaggtctgtgtgcagttcatgatggtgtggcagcggtagacagagaaggggtcctgcagcttggccaggcgttcctctgtgaagtcgtctctggagtcgatcatccagcgataggcctgcatgagaactgcaggcccaggtacttgtctccgttccaccagtagctggggcagctggtgctgagcaggcacacaggatgcactcgtacagcccgtccagcttctcccggtcctcgatggactgcagatactgttgcttgccctcctgggactcatccttcttcttcagataaggctcaatggatttgtattgtgcgtaaagttactcaaatcagggactagatccttgatcacatacatatgtggaagagggtagattttggagactttgctgaggtccgtgtcgatcctgcgtgtgcacccagagtattgcctccgttgatgttcatggcgcaagagcacagatgccttctctacaagatcttcggaaggttaaagtagaatccacttcattcttgatcttgattaagcatccacaccataggtccgcacttattcagatccactcgtacgtctgcattc

SEQ ID NO: 1463 - DNA, 510 bp, Mus musculus
tcggggtctccttgaagcgcggcttcccggctgccgttctcggcagagtcggcctgcagtttcaggcctgtcgaggggcacagacagctgctgctgcagctcccagaatcaaaaaatttgccatttaccgatgggacccagacaagactggagataaacctcgaatgcagacgtacgaggtggatctgaataagtgcggacctatggtgttggatgctttaatcaagatcaagaatgaagtggattctactttaaccttccgaagatcttgtagagaaggcatctgtggctcttgcgccatgaacatcaacggaggcaatactctggcgtgcacacgcaggatcgacacggacctcagcaaagtctccaaaatctaccctcttccacatatgtatgtgatcaaggatctagtccctgatttgagtaacttctacgcacaatacaaatccattgagccttatctgaagaagaaggatgagtcccaggagggcaagcaacagtatctgcagt

SEQ ID NO: 1464 - DNA, 670 bp, Mus musculus
ggtaacagacccaaagctttaatacccacaagaatccatgtgcagcccgtctggctcacaagtctgatttagtagaaggcagttcaggagctgtaatacttgagaagattctcatctgtaggttttagaattttcttatctgccatattcactacccagccaggagcaagaccaacgaaaatctgcctcggatccttccggcggctgagcattctgaagagttcatctttcgtaatatcaggaaggacgtagccaaacttcatggcgagttcaagtcttgcttcaggaaacttggcagggtcagccaggtagccccggttttttgcatcggtgtaatagggcaccagtgactcagggggaagcattcttttcggaattggttgtccccgcagaaagaatggaataggcttgcacagaatttctagacttcttgggtcatagaaggctgtagtaacaacaccgccattttttcaatggcagcaatggctaattctgaagccagctgcacctcaatattaatttttgcttgaaagtatcagcaccctcttcaaccagctggactccataatccctcttaagcggctggatggtcaacctctcccattcacaagctgggttaggtcaataggttgagttggatcaaccgacctaaatcaatgagatactgtag

SEQ ID NO: 1465 - DNA, 562 bp, Mus musculus
aagcaccgcgggtcatggctggcacggcgcgcggctgcgggaccagcctggacctgctgcggtccttgccgagagtaagcctggccaacctgaagcccagtcctaactccagaaaacgggaaagacgtccaagagatcggagaagaggtaggaagtgtggcagaggccataaaggagaaaggcagagaggaacccggccaaggctgggctttgagggagggcagactccattttacatacgaatcccaaaatatggatttaatgaaggacatagtttcaggcaccagtatcagcctttgagtctcaggagactacagtatctcattgatttaggtcgagttgatccaactcaacctattgacctaacccagcttgtgaatgggagaggtgtgaccatccagccgcttaagagggattatggagtccagctggttgaagagggtgctgatacttttcaagcaaaaattaatattgaggtgcagctggcttcagaattagccattgctgccattgaaaaaatggcggtgttgttactacagccttctatgacccaagaagtcta

SEQ ID NO: 1466 - DNA, 663 bp, Mus musculus
caggttcaatatagcaatttaataataacctcagaaaatctcaaagcttaaagtatacatacataagcatgtggtatccacttggtaccacctgagtaacaacagtatgtagaccacttcttgatgaccctacagtctggaagcaacacatctgtccaggcagctaccattccagctccacagggtactgcccagtgaggcaagctgtacagtgtcccgtcttttcaaaatattccaaaccatttccattttcttgaattgcaatatcatgttttttcactttctgcttcttaaattttatttcttgttgcacagatgaaaccagtccttccactgacagatacacaacgctgtttgctccgaggtactctgcaagacaatcaaattctggcttattggctatgagctcttcttttgtaggaatgtttattcccatgaagcacggatattttattggtggtgaaggactcgaatgtgcacctcttttgcaccggattctttgaggagttttatgatgggtgagatagtattgcccctcacaatcgaatcatctatgagaacgattcttttgcctttaaagttgtcagacaacacgccaaacttctttgcaacaccgagttgtcttaacctcatgtttggttgaatgaaggttcttcctacata

SEQ ID NO: 1467 - DNA, 561 bp, Mus musculus
gctggttggtgcttggaccacgccgcggcagcaggtccctccacgtgctttccgaggcgccatggagctggaggagttggggatccgcgaggaatgtggtgtgtttgggtgcatcgcttctggagactggcccacgcagctagatgtgccgcatgtgatcactctgggactcgtggggctacagcaccgaggtcaggagagcgctggtattgtgaccagtgatgggagtgcagtgcctaaattcagggtgcataagggaatgggtcttgtaaaccatgtttttaccgaagacaatttgaagaaattgtatgactcaaaccttggaatcggacatacgaggtacgccaccacgggaaagtgtgagctggaaaactgccagccattcgtagttgagacgcttcacggaaaaatagctgtggcccataacggggaactggtgaacgccgctcggttgcggaagaagcttctgcggcagggtattgggctttccacgtcctctgatagtgaaatgattacccagttactcgcatacacccctcctcaagaaaaagatgatgctcc

SEQ ID NO: 1468 - DNA, 605 bp, Mus musculus
aagaaagaaattaattttatttttcaagagttagtaaagtataattattcacaacaactgaccgaggtcacccaagtattaaaccagccatgtcttgctgcacacaggctgggttgactagagaatgtggaagggtgagtcccatgtttgcttagccatctctatgtttgcacacaggaacaactcagccaacaccacgtcaggagtcatttctatctaaggaaaggcagcagtatgacaagtggagaaggtacctaagtccatactgcccacagtaatagttctttgaaattagagaagccatagtgaggtgggcggaggtgttaccctccacacaaaggcaggatgacctttgttccaaagtcagcaccaggcagattaaggttagtgggactgtgggctaaaacaggacattaagtaaggtgatttgtcatttaaaaattgggccctacgcctttaatcccagcactcagaggcagaggcaggcagatttctgagttggaggccagcctggtctacaaagtgagtttcaggacagccagggatatacagagaaaccctgtctcgaaaaaccaaaaaaaaaaaaaaaaaaaaaaaaaaaaaaa

SEQ ID NO: 1469 - DNA, 518 bp, Mus musculus
cacagctgctggtggaagtccggcggaagcagcaaatgacagtggttagcaaaatgccctttgtgcccaccaactattatactctcaagtgaagatggcccatggggaagcccttccctccaggagtgtttctctagagggcatggcatagtgcttagtcagaacagtggagtacaactcccacgggtggaagctgaatgaggtttgctgggtctgcttagggttggggagagagtcctatctagaatctttcccttacaagccattccaattttagggcccaattttttttttttttttttttttttttttttagggttttcgagacagggtttctctgtatatccctggctgtcctgaaactcactttgtagaccaggctggcctccaactcaaaaatctgcctgcctctgcctctgagtgctgggattaaaggcgtagggcccaatttttaaatgacaaatcaccttacttaatgtcctgttttagcccacagtcccactaaccttaatctgcct

SEQ ID NO: 1470 - DNA, 672 bp, Mus musculus
  misc_feature (1)..(672): n is a, c, g, or t
aatagttaagagactttattctaacagctataattacagtgcttgtcgaaatgaaaactgaaaacaagtatacaaaacagttgattactaattgtgtattgaaagcggtaagaggttccacgacaccaaataaaccagttctgagatttccccaagataaatttaacagctccagcttcttcagtgtttatcaaaatacaaaagaaaaaagtagaggtcgtctttcgatggcaaatcggacccttgcaggctgagggaggaagctacttcacacatggagatgggggtgctccaggatgtgggtctgtaatggaccgaccctcccaccttgcacgcactcctgctggtgagacccaggcctcctgccagcgcgtccaagtgggcccaagagtaggctgggtatgcaggctgccattgggccttgcacacaccaagtacaagccaggccctgcaccccacaatggctcccagctnaccctaggtaaccgtgtgagcacaagtacaagcacaatgctatggaatgcaggtgacccaaagacaggcgagtcacgggggctctactgtgaccatgcagcggatggtggtttgttcatcaccttctctcctgttcccacagcgaaacaggggatctgatatctagcattcaggccattaactgtaaaacctacacta

SEQ ID NO: 1471 - DNA, 556 bp, Mus musculus
  misc_feature (1)..(556): n is a, c, g, or t
aacgaggcccgtgaagagctcatgaggatgctagctgaagatgagctccgagatgctgttctcttggtgtttgccaacaagcaggacctccccaatgccatgaatgcggccgaaatcacagacaagctggggctgcactctctacgccacaggaactggtacattcaggccacctgtgccaccagcggggacgggctctatgaaggactagattggctgtctaatcagctccggaaccagaagtgaaccagacccctccctccccctcacttcctcttctccgccctcagctttcctctcatgtggcaaacgtgcgactctgtggtcctgagtgccagaagctgtctccatgggttggtcacagtgtgcatcgcaccgtgctgtacatgtgcagacgcagcctgcagccaggtttttatttaatgtaaatagtttctgtttccactgaggcagtttctggtactcctatgcaatattacttagcttttttattgtaaaaagagaatcaactcaactgtcagtactgaganagggatttgggtgtaggggcacctgg

SEQ ID NO: 1472 - DNA, 761 bp, Mus musculus
caaaaatggttttatttattcttttcaagtttttaaggatttccaaaagtgaaaaacctgtagctcctctggctaacactactattgtgtcagtttaaggagaagaaagagtcacattcaaataaatgaaaggcatgatgtgatttagaaaaatatgccatggaagacagaagcaagaggttaaagtcacaaaattacatctgcagccaggcttgacaaaggtcctccttcagcacatctccgtttatgatgatgacctaagcaagggcttcagtacttttaaagtgtgaacagaaggctggaaaagggggagagcctgagttaagcctgatgcagggtcaggaatcggtgcacaaagtctcaggcagccactaggtcagctctgcttcagggatgtctgtgggatcacccatcaaagtatttccaaacagaaacaaggacaagattttgttgcactttccagtttaagaagcaatactgtaggcatcatcaggagggtaaagccagcaaaccaagaatgcattagcttttggagtcaacaggacagagtgtctgaaactcgaaattctaagcacaggctggtgtttcattttctatagagggattgaccggatgagggtgagagactgggaaaaggtaactgagaaatctttccatagaatacaccttgaccttcagaccaggtgtgcatggctaatgtgctcagaaagctactttgtaacaaaataaatggctaagggaaagaatgccaatcatacagg

SEQ ID NO: 1473 - DNA, 538 bp, Mus musculus
gaaaattccatgaatacttttgccaagttgaggaagaatttattaaaagaattaagcatgtaaaaagactgactgtattagcataagaactgtgtttagcaaaagacatcagaaggatgacagtagagaatgcaggtttggaggagacatttgcagtgcttgtcacctgataaaaaggtcctatctgaaaggtactggagggagaggactattggaaatgccagtccccatgtcacctctctaggagcctcagttcgaacatcattacgatcaaaactcctgttgtaacaggcagaattcttttttatcctctaattatttctcaaattctattttagaaaccttcactattaaccctgtcagaaacttcaaatctgggaattctgtgccacaaaccatgggtgatatagcagggtctgtgcaaaaaatggctcccgacactagagggctccccacacaccaaggtcctggccactcttcagagaccccatcatccctgggagcaacagcatcacagaagtgcttcgtacagatcaaa

SEQ ID NO: 1474 - DNA, 735 bp, Mus musculus
  misc_feature (1)..(735): n is a, c, g, or t
atccctaaagcagcatttatttactcttttaagtccaaaacatttattttagcagtctggcatttcataaccacccatcataattgacacaggttgacacacatgatgctgtcagggtacacaagaacaatagccaaagagttacaaaaaataaatccatgattcttaatcacaatcaaaaaaaagttacacatatcaaaaacttctgatgcattgcattgaaaggaaggtgtgtgccatcataatttaaagaggcacagcaagggctgctgaaacncacaagaaacagtttataaagctgatggtgaaggaatgagttgtcgctgtgtcagtttccattagctgaagggaggggtgagagggtcaaattcatttttgcatgcacaagatgtactgcttaacaaaacactatcagcttgttttaaatagcagccatagcctgtgttggctaattctcctttctacactcaattaccatcacctggatttgctagagatcaacagacataataaaatgccttgttcagaacacacttctctgcacaattcaaaaaggaagcgccctgtgactcaaagcaaccatcagtccagcaaatgcccatgaaggtttatctgaaactgcttcccaagggacaggagggcagatctgaatagctgtgtgccaatacagataggtttagcactagatatagtgattgtggcagggagaatcagtgataatgggggtggtgggtg

SEQ ID NO: 1475 - DNA, 530 bp, Mus musculus
cgagcgagcgagtgagcaggcggtgtgggcgtgcgaggcgaggccgagtcgcgagcgacatgggggatcgagagcagctgctgcagcgggcgcgactggcggagcaggcggagcgctacgacgatatggcctccgccatgaaggcggtgacagagctgaatgaaccactatctaacgaagatcgaaatctcctctctgtggcctacaagaatgtagttggtgccaggcgatcttcttggagggttattagtagcattgagcagaaaaccatggcagatgggaatgagaagaagttggagaaagttaaagcctaccgggagaagattgaaaaggagctggagacagtttgcaatgatgtcttggctctgcttgacaagttccttatcaagaactgcaatgattttcagtatgagagcaaggtgttctacctgaaaatgaagggcgattactaccgctacctggcagaggtggcttctggggagaagaaaaacagtgtggttgaagcttctgaggccgcgtataaggaagcc

SEQ ID NO: 1476 - DNA, 784 bp, Mus musculus
aacactttgtaatcagtatattagacagccatacatttcagtaactgcttaaattctgatatccagatttaagcatgtaagcatgtgacttcaaaacatacaacaaatctattcataatttgctatactaccaacattaaattgcagttacgttggagcctaagtcgaatagaaagcctggaacagacctaaggagcaccttccctggattatacatgcaaatcacccctccacgtacagatctcatcactttcatttgtaagttacttgggctttggaagtcactacacccaagcaagggcttatcatggtttgagaaggggaaaaaggtgatcatgttttctgtttatatatatatcttaaaaattgcacagcagaaggggatgcaatctagaagagcaagcccttaagcagtagcttatgataaacttctttaggaatgaatcatttctatcactaataacacaggcgaaatgtattatgccaccttctagtaatggctgaggcaatacaatgcaaaggcatcacaattggttcacttcatataactagacagaccgacatgtaactaattgttttcttttgattaccagttaaatacagaattttaatcccatagcttaacaatgaagggtcatacaacacatacctagcatgtcagtctaatgtacacagctattatcagttacacaagatatgacctgacagatgctaggggactctttaaactagtttttacaagtattcattttcatcttggacactgaagtcatcatacatacag

SEQ ID NO: 1477 - DNA, 574 bp, Mus musculus
gaggagcagcgtgtggctgagctgcgctgtgctccgctcctttccgctctccggcgccggcccgctcaccggctgtaaaaaatggtgaaagaaaccacttactacgatgttttgggggtaaaacccaatgccacccaggaagaattgaaaaaggcatatagaaaattggccttgaagtaccaccctgataagaatccaaatgaaggggaaaagtttaaacagatttctcaagcttatgaagttcttgctgattccaaaaaaagggaactatatgataaaggaggggagcaggcgattaaagagggcggagcaggtggtggttttggctcacccatggatatctttgatatgttctttggaggaggaggaagaatgcaaagagaaaggagaggtaaaaatgttgttcatcagctctcagtgaccttagaagacttatataatggtgcaacaagaaaactggctctgcaaaagaatgtgatttgtgacaaatgtgaaggccgaggtggtaagaaaggagcagtagagtgctgtcccaactgccgggggacaggtatgcagataaggattcatcaga

SEQ ID NO: 1478 - DNA, 634 bp, Mus musculus
gtaaatcacaacacgattcaaatgtcagactcctgaccggcagcttgactcttaacgagatcttgtagaggcttttgagtgccccagcaacaaatctcctcactgctgggcttagggaggctcacagatggctccggcctccagcacttgatcttggcttcacaggcccttgttaaagtacacacgccgtatttcaggatgagtcctttggatgctggcttgcaactcatcctccaagcttgtcacagacatggaactcttctgaggaaacagagcacagcacaggggggtggcgaataccaaacaaaagccaaccaacgtgacttggattggcgcactcatccacgggaacctctttaaaaaggctttcttttccaaggtgttcatgataaacggagggatggccatgccggggctgccatgaggatcctggagatgaccacctgcgtgatggcttgctttgctgcgttggtcgattctcccaagcgagtgccattttcatcagtgacaggaataccaaccttcagctccctttgtctcatcagtgggatgttaatgcagttagcagcagctacagcagcgaagggaacaaaacgtcctatcagtggggagacacgcttggttaaggcattga

SEQ ID NO: 1479 - DNA, 556 bp, Mus musculus
cggcgcgggtggcggccgggtaggcggatctgggacgatgtctggggaagtgccacccaacattaacatcaaggagcctcgatgggaccagagcacgttcattggccgagccagtcacttcttcacggttactgatcccagaaatatccttttaacgaacgaacagctagagaatgcgaggaaagtggtgcatgactacaggcaaggaatcgttcctgccggcctcacggaaaatgagctatggagagcgaagtacgcgtacgactcggccttccatcctgacaccggtgaaaagatgactctgataggaagaatgtcagctcaggtcccgatgaacatgaccatcacaggctgcgtgatgaccttctaccggaccacaccggctgtgcttttctggcagtggataaaccagtccttcaatgccgtggtcaactacaccaacagaagcggtgacgctcccctcactgtgaatgagctgggaacggcttatgtttctgcaaccactggcgctgtggcaacggccctaggactcaatgccttaaccaagcgtgtctcc

SEQ ID NO: 1480 - DNA, 635 bp, Mus musculus
  misc_feature (1)..(635): n is a, c, g, or t
ctgatattcagcactttattcttagtagtgaaacacctttcattaggtggaaaggcatcgggaatggatgggaccagcgcccatctgaggggattttcctggaaatcaggtgtttctccgtgcaaatttagaggaaacaccatcatggaagaaccgccccccagagtgcagccagtaatcaccaagccaatgccagggccgccttaggagttgccagactgctgggagagcntcttctatgtcaggttcgatgtcgatggtacgaaagcggcggctgtacctgcgcacgggaacaccgtcggggcccaccaggaacttctcaaagttccaggcaatgtcgttgcggcacaccggagaccaaatgatgtacttggggtcggtcatgagcgcatgngggtcgtcactgggtgttggcaaggcattccgcagggtntaaagagcgggtgagccttctcacattcacttcgcacttctcaaacaatgtaaaattgggctcgaacccgccaccaggtcggacgtacttgagggaattcagaatctcttcattcttgccattctcctggtgtccgaactgattgcacgggaaaccagcaccaccagtccacgaggtcccagacgcttctgcagatcgttta

SEQ ID NO: 1481 - DNA, 525 bp, Mus musculus
acgtttgagtcccaacatctccagtatgtgtgctgctcggctctccgcggcggcacagtccaccgtgtatgccttctccgcgcgcccgctgacgggcggggagcctgtgagcctgggctccctgcggggcaaggtgctgctcattgagaatgtcgcgtctctctgaggcaccacgatccgggactacaccgagataaacgatctgcagaagcgtctgggacctcgtggactggtggtgctcggtttcccgtgcaatcagttcggacaccaggagaatggcaagaatgaagagattctgaattccctcaagtacgtccgacctggtggcgggttcgagcccaattttacattgtttgagaagtgcgaagtgaatggtgagaaggctcacccgctctttaccttcctgcggaatgccttgccaacacccagtgacgaccccactgcgctcatgaccgaccccaagtacatcatttggtctccggtgtgccgcaacgacattgcctggaactttgagaagttcctggt

SEQ ID NO: 1482 - DNA, 630 bp, Mus musculus
  misc_feature (1)..(630): n is a, c, g, or t
cagggcacaggtgagctttattggccgcgggcagttctacagcagaacacgcacctggcgcacttgacctccagcgagggccctatgacccagcccccagccgtcccacagcaaccctggggactcaaacactgaaactccgtgccatctgggccaaccccaccccctccccctcctgacccctgtcctgtcccttgtgttcttgcctccgagggctcatgggaacagcactgagagggccagggtcattcagctctccaagggcggctcaaatgaagaaagaggcactgttggtggggggtaaagaggcagccaagctcagctctgatgggcaaactgatttcttctcggttgcaggtcacagcatctggcctcccctctccctgagatagacttccccccagtctgactaggggtctacagtgagggacggagcagaacaggcagaatgaaaggcaagtccctttctggtctgacaggcctcaaagttaagccatgaggctctctgccctctgcctcggtctgcaggcaggcaagtccccgaggaggggctcagctccggtagctccggagnnatgcccagcgatcaccagtctctggatttcgctggtcccttcgtaatctcagtga

SEQ ID NO: 1483 - DNA, 532 bp, Mus musculus
agagctgctgcaggaggtcctggaggtctgtgcccatggctgccgccttgctcgcccgggcccgtggccctctccgtagagctctcggtgttcgggactggcgacggttacacactgtttaccagtctgtggagctgcctgagacacaccagatgttgcgtcagacatgccgtgactttgccgagaaggagttggtccccattgcggcccagctggacagggagcatctcttccccacagctcaggttaagaagatgggtgagctcgggctgctggccatggatgtgccagaggagctgagtggtgcaggcttggattacctggcctactccatcgccctggaggagatcagccgtgcctgcgcctccacgggagttatcatgagcgtcaacaattctctctacttgggacccattctgaagtttggatccgcacagcagaagcaacagtggatcacccctttcaccaatggtgacaaaatcggctgttttgccctcagtgagccaggcaatggcagtgatgctggagccgc

SEQ ID NO: 1484 - DNA, 625 bp, Mus musculus
  misc_feature (1)..(625): n is a, c, g, or t
ggccttccaacactcacacattttaatgtcagattgttcatgttttctgtgagcctgggggttctctacccaaatgggggagctgtgctcttgctagcctagagcctcaggtcacattttttgtacacgtccttccagggcctcgagctcagccaacacctccttgggcaggtcctggttgacttgctctgtcaggtagccccgaatatcacgaacctcctgctcccagaagtccttggggatggagaacagctgactggtgtccactgcgctgaggccactgaggtccagggctccttcctttggtactagcccaatgggagtctcttgggcactgtcttctccttctaatcttcggcagatccagtctagcacacgagcattctctccaaagcctggccacaggaagcggcctgcttcatctctccggaaccaattgacatggaagatacgaggcagccgggcacctttttgtccctccatgctcaaccagtgttccaggtagcgtccaaagttatagccaaaaaaaggccgcatgagaagggatcatgcataatggtctttcctttgtgctccgagcggcagtggactcagagcgcatggcaancctacaaacaccccatga

SEQ ID NO: 1485 - DNA, 551 bp, Mus musculus
tccttccccgccttccttgtctccccgactgcgctcgttcctgtggccatcccgcagcgccagtccaggtgccatggctgctatgtacctccccggcctgcggcttagccggcacgggctaaggccctggtgctggtcaccgtgccgtagcatccaaaccctgcatgtgctcagtggagatatgagtcagctgccggctggagttcgagactttgtggcgcgcagtgcgcatctgtgccaaccagagggcatccacatctgtgatgggaccgaggctgagaacactgccatactggccctgctggaagaacagggtcttatccgcaaactccccaagtataagaactgctggctggcccgcacagaccccaaggatgtggcacgggtagaaagcaagacggtgattgtaactccttcgcagcgggacacagtgcctctcctggctggtggggccagggggcagctgggcaactggatgtccccagatgagttccagagagctgtggacgagagattcccaggatgcatgcagggccgcattatgtatgtgc

SEQ ID NO: 1486 - DNA, 620 bp, Mus musculus
aaccttaagctttatttaaataacctcagtgagaacccagcagaccagcaaccatcttctcatccaccccctcacctcacaaggaggtgcagaccgcctcgcctctcagtggaagcgggcttggcctctgccacggccagctgatggagctggaggatccacagtggagcgggggttcttgatagtctcatccacggacacaataaggcatgcagcctcagaagctgctgtcagagcgttgatgcgcaccatggctggctcccacacaaatgcctggaagttgtcggcgatgttctcattgttgatgtccaccccataccacatacctccctgtgcgtgtcgagcccgcagcttgttgaggatgtttgtggcatcaaagccagcgttgtcacatagctgtcgtggaataatctccagggccttggcatagtgcccaatcaacagctgctgcttcccaggaatggtcctcgagtaatcccgcaggtatttggaaagttccatctcgatggctccaccaccagccaccacagagtcattcttgatggccctcctcacaatcatgatggcatcatgtagggacctctctgtctcttccataaactgctcagcgccaccacgga

SEQ ID NO: 1487 - DNA, 546 bp, Mus musculus
ttgggtgggcggccccgaggcggacaactgacgagttgcgggtacctgaagccgcttccaagatgatgcccacaccagttatcctgttgaaagagggtactgatagctcccagggcatccctcagctcgtgagtaacatcagtgcctgccaagtgattgctgaggctgtaagaaccaccctgggtccccgtggcatggacaaacttattgtggatggccgaggcaaagcaacaatatctaatgatggggccacaattctgaaactcctcgatgttgtccatcctgcagcaaagactttagtggacatagccaagtcccaggatgctgaggttggtgatggcaccacctcagtgaccctgctggctgcggagtttctgaagcaggtgaagccctacgtggaagaaggtttacaccctcagatcatcatccgagctttccgcacagccacccaattggctgttaacaaaatcaaagagatagctgtgactgtgaagaagcaagataaagtagagcagaggaagatgctggagaagtgtgcgatgacag

SEQ ID NO: 1488 - DNA, 546 bp, Mus musculus; identical to SEQ ID NO: 1487

SEQ ID NO: 1489 - DNA, 690 bp, Mus musculus
  misc_feature (1)..(690): n is a, c, g, or t
aaccttaagctttatttaaataacctcagtgagaacccagcagaccagcaaccatcttctcatccaccccctcacctcacaaggaggtgcagaccgcctcgcctctcagtggaagcgggcttggcctctgccacggccagctgatggagctggaggatccacagtggagcgggggttcttgatagtctcatccacggacacaataaggcatgcagcctcagaagctgctgtcagagcgttgatgcgcaccatggctggctcccacacaaatgcctggaagttgtcggcgatgttctcattgttgatgtccaccccataccacatacctccctgtgcgtgtcgagcccgcagcttgnttgaggatgtttgtggcatcaaagccagcgttgtcacatagctgtcgtggaataatctccagggccttggcatatgccccaatcaacagctgctgcttcccaggaatggtcctcgagtaatcccgcaggtatttggaaagttccatctcgatggctccaccaccagccaccacagagtcattcttgatggccctcctcacaatcatgatggcatcatgtagggacctctctgtctcttccataaactgctcagcgccaccacggaggatgatggtaatgtcttggccttagggagccagtgaagaaattgtacctctctcctccaatttgggtc

SEQ ID NO: 1490 - DNA, 722 bp, Mus musculus
cctcaacacaagtgatctttaattactttgacggagctagagggaatacgcttcattagtccactggcctaccccttcccttccttcccttcccttcccttcccttctctgcagctgagagcatgctgagctaatgctgggggatgcatgctttgttagcctaacacctcagctagggcagagtggttgcctctttggtggacacactggctcagaggtaacagtgttgagagggtacagaagagtggcaggcctcaggcttcatgcatacagaaaccttgtcctgaagatggtccagcctgggcatgctcctggagttactaatgccaaatttactgcttctaatccagtatacattcaaagagtgcacaacagggacagggattgggctacacctgaaatatggagctggccaggatacagtggtaggcagagagactaagaactagtctctacagcagacagcaggcccggaatatcagcagatccttgggcacagtaatcttcagtaagacactctcattggctgcaatgaagagcactccaccacggtacagagggatttctgcatgggctgagggtatgatagctgtcactgtcccttggaccatcagaaggatgctggcagagtctagtgttgagactttgtattcagtgacagagctagggacctccatcttcataacagtgaagtctggcacaggaggatcatagatagagag

SEQ ID NO: 1491 - DNA, 558 bp, Mus musculus
gagtccgcgagtgttcccactttcctgtgtggtgcagcagtatgcctgggggaaggtgggctccaaaagtgaagtggcctgcctgctggctagcagtgatccactggcccagatttcagaggacaagccatatgcagagctgtggatggggacacacccccggggagatgccaagatccttgacaaccgtatttcccagaagaccttaggccagtggattgctgaaaacccggactgcttgggctcaaaggtcaaaaacacctttaatggaaagctgcccttcctcttcaaagtactgtcagtggacacggccctgtctatccaggcacaccctaacaaggagctggcagagaagctgcatctccaggctccagagcactaccctgatgccaaccacaagccagaaatggccattgcccttacctccttccagggcttgtgtggtttccggccagtggaggagattgtgacctttatgaagaaggtgcctgagttccagttgctgattggagatgatgccacagcacagctgaaggagagcgtgggtggggatactga

SEQ ID NO: 1492 - DNA, 801 bp, Mus musculus
gggtagaacctagcattttatttagatcttcattaaactgttggaattgagaaccagacatacgtaataaacctccaaaaaatagatcctgaaagcactttcttgcttagggcaagcagtcatggaataagcatgtaaacaagctggcttctctgtaccacaccagccaagtcagctttctccatggccagctgcaccagctctgccctcccttctgttaacaccagccagaccccctgtaggtctaacccaaggtttttctgtaggacaccttggcctacctgggaatgctggaaacatgttaaaggaattcatggtgttgaagaaaaaaaaaaatcttttaaaagctgccatctgaggtgatggcttctctgtacttacgccataccccagaatacaataaataagcaattagaaaatgttcaagtatgaagggatttcctcctccccgccaaaagcactgctctctgaaggaagctggtttctctgtagctacaccagctgttcagaaagctcattggacctggttttgaacataaaacaaagttaaaaccctgggaggagctattgtgcagtgtggagtactctttcttataaagaaaaaaaagttacctggtaccaaagtgtgcacctacagaccctcaggtactgccctgtgacttctctgtatatcacaagggtgccaaatgcctgtttttctagactaaaagttggtgaggtttggctagtgctgaaacatgcataggggtggtttactaaatagaactttattacgtacgtcctccaaagacagctgaaaag

SEQ ID NO: 1493 - DNA, 580 bp, Mus musculus
aagaagaattttgatcttcgccctggggtcattgtcagggatctggatctgaagaagccaatttatcagaggactgcagcctatggccactttggtagggacagcttcccatgggaagtgcccaaaaagcttaaatattgaaagtgttagccttttttccccagacttgttggcgtaggttacagagaagccttcaagctctgagggaaagggccttcttcctaaatttttctgtcctctttcagctcctgatcagttgcagtcactctaatcaatgacatgaattttagcttttgtgggggactgtaagttgggcttgctattctgtccctaggtgttttgttcaccattataatggatatagtgagcataggtgagccatgtaactgcctagaaacaaacactgtagtgaataatgctttgaaatcgaacctttgtgccctatcacctaatcctccaaagtcctaattgcaattactttcccaccagatgctgaaaacatcctctgtagtgtgcacgtaaagtacttgtagtttgactgtagactctggcaatgccacagccctgtcagcatgaatct

SEQ ID NO: 1494 - DNA, 730 bp, Mus musculus
gctgaactgctgattttcctttttcaatagaatttaattctggagtgtgagcagggacctactacattcattgtccaacccccactggtgtaagactccagattcttggcatgtgagtcagctgtttggtagctccacctcatccctgcagagaggcagtgaggcccaggtgcggaggaggcctcacaccgagggtggggaggttttccgctgaaggaggtactggtgaatgctgtcagcatctcgcttgagccaagcagcattcaacaggatattttcacaacactgctggatggtgcgctcagctgaaggagctgggtgactctcgaagaaagccttaacttctccagccattttatcaactgcaaacccctcaactgagagctttattagtctggatattaagaaccctccctggtaccggttgtgaagctcctcccagttgtccttgatgaatttccaagcagctttcctcccatgcttgctgcctccagccactccaccaatcaccgacacagtgtcctgcggacggacctcttctgaaagtgcaaaagtaaggactttttgaatcagttcaggtgaaagagtagccccaagaactctttcaattctgtttttctcttcttgcatatcagcttgtttgtgaagcttcagcatgatatctaaggtagcgccatccccatgctttaaaacagtgagatagacaggactccttaggtcagcagaaaga

SEQ ID NO: 1495 - DNA, 513 bp, Mus musculus
tctcttgtcccacacagacttctatgaggaaatccaggagtttgtcaaagatgtcttttcacctataggagagagattgggctgggaccccaaacctggagaaggtcatctagacgcactcctgaggggcttggtgctgggcaaactgggaaaagcaggccataaggcaactttggaagaagcccgtcgtcggtttaaggagcacgtggaagggaaacagattctttctgctgacctaaggagtcctgtctatctcactgttttaaagcatggggatggcgctaccttagatatcatgctgaagcttcacaaacaagctgatatgcaagaagagaaaaacagaattgaaagagttcttggggctactctttcacctgaactgattcaaaaagtccttacttttgcactttcagaagaggtccgtccgcaggacactgtgtcggtgattggtggagtggctggaggcagcaagcatgggaggaaagctgcttggaaattcatcaaggacaactg

SEQ ID NO: 1496 - DNA, 121 bp, Mus musculus
tggcggggtcgccttcccatccgctgcctcgacgatcttcgcttgcctcctcgctcgctgtcccgttgtcctagctcgccgccgcccgctgagcttgtcttttccctgcttgcagacatgg

SEQ ID NO: 1497 - DNA, 488 bp, Mus musculus
cacatccgagaacttttattggacacagctgggagccagctctgaggagcagtagcactctatcctccaccctggctgttcagggcagggggaagggtggctccatccaaggagtctcagcaacaggaaccccacaaggcaacagtctactaatgattactatgtagttgggagacaggagctgctccacagacgcatgaataggtcaaatcttttataaataaacatccagggaagagaaaaatgacaactctagttcattcttatacacaggagcactctagggcgatgggtggggtaaccagaggctgacttcgtcactggtcaggggcctgggtgggagatgagtgggcccgtatgtccacagcacggtgcagtaggggcaaggcgggggcgacagacaatgggcactaggacactgcacatttacaagaccaactactgaggggcagctgcccgtgcatgtgtcaggctgttcgttctggaat

SEQ ID NO: 1498 - DNA, 486 bp, Mus musculus
caatagcatttgcctttactaaggggaaaaaatttttaaataacctttacaggccattaaaaaattagataccacctttcttacgtcctttctaagtcttctgtttaaaaaagggattttaaatttaaacgtacattttcaacaaatagaaagcaacacaattggcaactggaagtagaaagcccctgggacctgcccctggatagaggggaggggaagaaagtcaaaagtcctcagtccctcctgggcgtggctggcaggtaggcctcgacctgagcagccatccctccctgcaccacccggggatggcacagcccactggggagagatgatgggccaagtcccagctctggtggggggagtcccaagctctggggggtggagtcccaggtctggtgggcagagtcccaactccagtgagcagtagggcagggatcccactcagatcacaaagtcatcatggtccgcgggactgaaggcagctgc

SEQ ID NO: 1499 - DNA, 542 bp, Mus musculus
ctgtggaccaaggagtggtacatcggctactaccagggcaaggtgggcctggtgcacaccaagaacgtgctggtcgtcggcaaggcccggcccagcctgttctcggggcccgagctgagcacctcagtgctgctggagcagatcctgcggccctgcaagttccttacctacatctatgcctctgtgcggaccttactcatggagaacatcagcagctggcgggcctttgctgatgccctgggttacggcaacctgccgctcaccttcttctgccgggcagagctggacagcgagccggaacgggtggcttccgttctggaaaagctcaaggaagactgtaacaaccctgacaacaaggaccggaagtccttccagaaggagctggtgatggctttgctgaaaatggactgccagggcctggtggtgagactcatccaggactttgtgctcctgaccacagctgtcgaagtggcccagcgctggagggaactggctgagaagctagccaaggtctccaagcaacagatggatgcctatgagtc

SEQ ID NO: 1500 - DNA, 568 bp, Mus musculus
aaacaagaataaatttaatttcttttaaagatttaatgatatacaaaacgtatatggtatagtatttttaagtaatacacctttctctccacatcaacattaaacactatttaacagcttatctctgcggccttggctgtatctatgagatacactattgaatacaagtaagctttacactgctccttccaaataaaaattaaaattagtacctaggaaatgaaaagaaagagaaagcataaaacttgagtcaaatgataagcttttcttgttgctaaatatgcaaaaatatctgggcaattaagttagattttattggcataaagttgtattgggatctccctatactgtataaggataatccaacaactgatttcttaagtaccagaaatagaattcacattgacacattcctatagaattttcaatgtgagagctcacatgacactctgatttgatacactaagtctgtaaatctttggagatgtatgcaactgcaggctgttacaactgtaaccttcctcacaggaaacacccattgaacagtgagttaattcttatttatcat

SEQ ID NO: 1501 - DNA, 560 bp, Mus musculus
ctctccagaagtcgattctaaagcagctttgttaccggattggttacgagatagaccatcaaacagagaaatgccatctgaaggaggaacattaaatggtcttgcttctccatttaagcccgttttggatactatttactattattcagctgtggaaagaaataacctgatgaggttgtcacagagtattcccttcgttcctgtacctccacgaggcgagcctgtcacagtgtaccgtctggaggagagttctcccagtatactgaataacagcatgtcttcatggtctcagctaggcctctgtgccaaaattgagtttttaagtaaagaggaaatgggaggtggtttacgaagagcagtcaaagtgctgtgtacctggtcagagcacgatatcctgaagtcagggcatctctatatcattaagtcatttcttcctgaggtgataaacacatggtcaagcatttataaagaagatacggttctacatctctgtctcagagaaatacaacaacagagagcagcacaaaagctcacatttgcctttaatcagatgaaaccca

SEQ ID NO: 1502 - DNA, 527 bp, Mus musculus
gttatgaaaaaatagatttattgcccaggagttgcagaggcttctccggggcggaaaggcacagggctcaggcccgtcccaggctcttcttgatgaagtggcccactagccgctgtggtctctgctggtattccacaagcacatcgtggggagtgttgatctggtctccttgcagacggtccagaagggtgacacacaccacagccgctttcaggccacaggcactgcacatggtggcaaacaccgaagattccatctcgatatttcggacacccgcggcatgggctgcacgcagataagactgtttgtctttctctgtgtaggagcagagggcgccatccagacggccttgcccctcatagaagtccaaggtgcacatggtgttgcccacaaccatggggaactcattcaggtctgaggagcactgcaccaactcctgaaccagctgcgcgtccaggttggtgttgcgaatcacccgttttcccaggacaatctgctcaaactccggcttgaagcactcattcact

SEQ ID NO: 1503 - DNA, 616 bp, Mus musculus
  misc_feature (1)..(616): n is a, c, g, or t
gggaggcgagcctgccgacagctaggttctcctttctggtccttttaaaagctctggtgcgctgcttctctctcacagtgctccagcgcggccaacggggactgagcggtcttgacgaagtgattgactggtggtcnttgacactctggaagccttctcgcgacgtggacatcggtctctgacagtcctcctacagtgagaacatggcagctacaggaactgaagcaaaggaccttgaaaaccatcacaatgactgcttcatccaactttcaaatccaaacatagcagcaatgaaggaagacgtgctctaccatttcaacctcagcactagcacacacgatttccctgctatgtttggagacgtgaagtttgtgtgtgttggtggaagctcttcccggatgaacaccttcatcaagtatgtggctgcagagctgggccttgaccatccagggaaggaatatcccaacatctgtgcaggcactgaccgctacgccatgtataaagccgggcccgtgctgtctgtgagccatggcatgggcattccttccatcggcatcatgttgcacgagctcatcaagatgctgtaccatgccaggtgctccaacatcaccatcat

SEQ ID NO: 1504 - DNA, 448 bp, Mus musculus
ggacttctgcggcttttatttttgcatgtaaaccactggggggagggggatcttgatggtgggcaccctagagattacactggagttccgagggctccagacactagctgggaagtcaggtgacagaaacaatgattcagaccaatcacatgattgcaaaactgggtctccagcagggattctggtggtcaggtgtggatgcctaaggaagcagtgacatgggaggggcacgcactgggctggccttgagctgctgggatgacatcagggatagaggacctagcagctggtggctccagggatctccggtccatgctttatttggccagggggttcctgaaggacctgccagcaaacttggctttgctgcccagctcttcctcaattctgaggatctgattggacttggccaggcgctcggatcggcaaggggcaccagtcttgatct

SEQ ID NO: 1505 - DNA, 483 bp, Mus musculus
  misc_feature (1)..(483): n is a, c, g, or t
cggtgtccacggcaccctctttccttgctttgcagcgatcctactgccagaaattcgccatgtctattctcaggatccacgccagagagatctttgactcccgtgggaatcccactgttgaggtcgatctgnactccgtaaaaggtctcttccgagctgcggtgcccagcggtgcgtccactggcatctacgaggccctagaactccgagacaatgataagacccgcttcatggggaagggtgtctcacaggctgttgagcacatcaataaaactattgcgcctgctctggttagcaagaaagtgaatgttgtggagcaagagaagattgacaagctgatgatcgagatggacggcacagagaataaatctaaatttggtgcaaatgccatcctgggagtgtccctggctgtctgcaaagctggtgccgtggaaaagggggtgcccctttaccgccacattgctgacttggccggcaaccctg

SEQ ID NO: 1506 - DNA, 573 bp, Mus musculus
  misc_feature (1)..(573): n is a, c, g, or t
cggtgtccacggcaccctctttccttgctttgcagcgatcctactgccagaaattcgccatgtctattctcaggatccacgccagagagatctttgactcccgtgggaatcccactgttgaggtcgatctgnactccttaaaaggtctcttccgagctgcggtgcccagcggtgcgtccactggcatctacgaggccctagaactccgagacaatgataagacccgcttcatggggaagggtgtctcacaggctgttgagcacatcaataaaactattgcgcctgctctggttagcaagaaagtgaatgttgtggagcaagagaagattgacaagctgatgatcgagatggacggcacagagaataaatctaaatttggtgcaaatgccatcctgggagtgtccctggctgtctgcaaagctggtgccgtggaaaagggggtgcccctttaccgccacattgctgacttggccggcaaccctgaagtcatcctgcctgtcccggctttcaatgtgatcaacggtggttctcatgctggcaacaagctggccatgcaagagttcatgatcctgc

SEQ ID NO: 1507 - DNA, 400 bp, Mus musculus
ggacttctgcggcttttatttttgcatgtaaaccactggggggagggggatcttgatggtgggcaccctagagattacactggagttccgagggctccagacactagctgggaagtcaggtgacagaaacaatgattcagaccaatcacatgattgcaaaactgggtctccagcagggattctggtggtcaggtgtggatgcctaaggaagcagtgacatgggaggggcacgcactgggctggccttgagctgctgggatgacatcagggatagaggacctagcagctggtggctccagggatctccggtccatgctttatttggccagggggttcctgaaggacctgccagcaaacttggctttgctgcccagctcttcctcaattctgaggatctgat

SEQ ID NO: 1508 - DNA, 587 bp, Mus musculus
  misc_feature (1)..(587): n is a, c, g, or t
cggtgtccacggcaccctctttccttgctttgcagcgatcctactgccagaaattcgccatgtgctattttctcaggatcccatcgccagagnannnatctttgacntcccnnngtgggaanntcccactgtgtgagnggtcgatctgtttttttttaaaaggtctcttccgagctgcggtgcccagcggtgcgtccactggcatctacgaggccctagaactccgagacaatgataagacccgcttcatggggaagggtgtctcacaggctgttgagcacatcaataaaactattgcgcctgctctggttagcaagaaagtgaatgttgtggagcaagagaagattgacaagctgatgatcgagatggacggcacagagaataaatctaaatttggtgcaaatgccatcctgggagtgtccctggctgtctgcaaagctggtgccgtggaaaagggggtgcccctttaccgccacattgctgacttggccggcaaccctgaagtcatcctgcctgtcccggctttcaatgtgatcaacggtggttctcatgctggcaacaagctggccatgcaagagttcatgatc

SEQ ID NO: 1509 - DNA, 321 bp, Mus musculus
ggacttctgcggcttttatttttgcatgtaaaccactggggggagggggatcttgatggtgggcaccctagagattacactggagttccgagggctccagacactagctgggaagtcaggtgacagaaacaatgattcagaccaatcacatgattgcaaaactgggtctccagcagggattctggtggtcaggtgtggatgcctaaggaagcagtgacatgggaggggcacgcactgggctggccttgagctgctgggatgacatcagggatagaggacctagcagctggtggctccagggatctccggtccatgctttat

SEQ ID NO: 1510 - DNA, 510 bp, Mus musculus
cagctgtaagtttttattgaatctcagcctcaggactggtaacaatgtctcagtgttactggttctagccagtttcagatgcttcacaggatttttgaaataacttttaagacataccaattttatagatgttaaaatcttggtaatttctccaaatccttttttttcaatgtcaagagttaaaagttcaaatattgaaaatttagaatattagtatgggggccacctcaatatagaaaagaaaaaaaaattatataatcttaaactgtttaaatttttcttaacatttcctatagtgaaaggctatgaatttcaaccatagaaatttctcattaaaacgttcaagtatttcctattttaggatatttgaaattctaaaacgttttttacttaaattaatttgtactgagctacttaaaaaataattgtggcactttagtaagacattaattctactgcatattttaagtacctcaggtataacctaatcaatagcaggttcctggagag

SEQ ID NO: 1511 - DNA, 511 bp, Mus musculus
tacccagcaggatgttgagttgcatgtccagaagatttatgtgatcagcttggctgaacctcgcctgcccttgcagctggatgatgccattcggcctgaagtggaaggagaagaggacggaagagctacggtttatctggatacaagattagacaacagagtcattgaccttaggacatcaactagtcaggccatcttccgtctccagtccggcatctgccatctcttccgagaaactttaattaacaaaggttttgtggaaatccaaactcctaaaataatttcagctgccagtgaaggaggagccaatgtttttactgtgtcctattttaaaaataatgcctaccttgctcagtctccacaattgtataagcagatgtgcatttgtgctgattttgagaaggttttctgcattggaccagttttcagagctgaagactccaatacccatagacatctgactgaatttgttggtttggatattgaaatggcctttaattatcattaccat

SEQ ID NO: 1512 - DNA, 545 bp, Mus musculus
gaagagaaccattgtatttttttactctttgagccgtgatacaagtgactttcatggtttccaaagttgggggagggaggcggggggacattaactttgacagttcattcaaacgatgcgatgatcagccacggttgagttgacagtcgggagcagcagccatgagagctgcaagccacactgtacaggaagagcccctttgctggagatttttataatatccttaaaaatgcatattaaataacttcctctggaccacagacatgattgaactcaaaaaaataaaagccctataaatactgccgagtcagccctgtctctgtatctcccttcttgcataaaatggaatatttccaaccaagcactgaaacataaatattaaaataataagtgggatacgctacaaatctacttcacaatctcttcactactgtagcaccttgttaccagggccaattgcattcatttcgtaaagaacacgagagatctgagaagctcgaggacccacccgtatgacttgccattaaatatttaatcaccatttc

SEQ ID NO: 1513 - DNA, 460 bp, Mus musculus
  misc_feature (1)..(460): n is a, c, g, or t
gtggattggtgggtttacagggtgaagaaagttcactacagagccaacagaaaatcatcttgaggtcattgaaccctgcctttctgaggggtttcctctccccgtttttctttttcctctccaaagggggccnttgaatctctagcgtaggctgaactctctagatggatgaaatacaacaaaggcttaggacttgaaatggtgattaaatatttaatggcaagtcatacgggtgggtcctcgagcttctcagatctctcgtgttctttacgaaatgaatgcaattggccctggtaacaaggtgctacagtagtgaagagattgtgaagtagatttgtagcgtatcccacttattattttaatatttatgtttcagtgcttggttggaaatattccattttatgcaagaagggagatacagagacagggctgactcggcagtatttatagggcttttatt

SEQ ID NO: 1514 - DNA, 503 bp, Mus musculus
ggagtttaaaaccaagtatttaatgttttcattaaattgtttcaatacaatttcaaacaaatgccaactggaagacaatgtccaaaaactctgaagcttccagacaaggaacaaggtggttgtccttcattccagccacagtacttctgtccataatgatgcagtcaaccatccttttatccagattatcgagtatttaccacatcatcgattttcagaatgctccgcacagtttcagttgctaaggtcaaagcactgactgacaccaacagaggctgaacaaccatttcctccaaaatgttggagatcccaccctttcggacattaatgcctgtagttttttctccttgggcatggcggtttcttagctctgttactgtagaaatgggattcaggccagcattttcagctagtgtagatggaatgacttccatagcatccgcgaaagcacgaacacagtaggactccataccactcagtgttcgggagtactctgtcagtct

SEQ ID NO: 1515 - DNA, 589 bp, Mus musculus
  misc_feature (1)..(589): n is a, c, g, or t
tctggaaggttcgttgaggaggcggtcagggagaccgttactccacagcaagccggaatccgtgtccatccgtcctcctgaacccgcgcagacgccaccaaggtcgccatgccggagaacgtagcttcccttttttttgcgcccaccgccgggcccggcagccgcgggaaaagcgcctaccaggaccgcgacaagccagcccangaccgcttcagcaatatttccgcggccaaagcggntgctgatgctattagaacaagccttggacctaaaggaatggacaaaatgattcaagatggaaaaggcgatgtgaccattacaaatgatggtgccaccattctgaaacaaatgcaggtattgcatccagcagccagaatgctggtggaattgtctaaagctcaagacatagaagcaggagatggcaccacgtcggttgtcatcattgctggctctcttttagactcctgtaccaaacttctgcagaaaggtatacatccaaccattatttccgagtcattccagaaagctttggaaaaggggcttgaaatccttactgacatgtctcgacctgtgcaactgagcgacagag

SEQ ID NO: 1516 - DNA, 504 bp, Mus musculus
ctaagaaatactgtttaattgaagtaaataaagctgagctcaagcagttggtggcactgtttgtgtattaagtcctgcctccccaggcaggtccattatcacccgagaagacctgggttgacactaaatccagtgtcttggctgtcagtgtttctccaggaccttgaccaaaaggtcgttcaggcggccgaccatggcccgagggtcatcaacgagtcctgctgctatcatggcattctcatagatctgatccacgagcagctgggccagctccggctcgctctccctcagctggcagagcttctttatcagtgtgtgcctggggttgatctccagtgtgggctgtagcagttgggcgcgttcctcctgggtcttggccagctgctgcatacgcaagaaatgccgagcagcccccatctccagcacggtcaccatggcagggtgggtgtctaggcggaaagtcaccttcacattggtgacacgggaccctagtgcatttctcat

SEQ ID NO: 1517 - DNA, 589 bp, Mus musculus
tggatagtgaggacattcccctgaacctcagcagagagctcctgcaggagagtgcgctcatccggaaactccgggatgttctacaacagagattgatcaagttcttcattgaccagagtaaaaaagatgcttgttaatacgcaaagttttttgaagattatggcttgttcatgagggagggcattgtgaccactgcagagcaagacatcaaggaggatattgcaaaactgctacggtatgagtcctcagccctgcctgctgggcagctgaccagcttaccagactatgccagccgaatgcaggctggcacccgcaacatctattacctgtgtgcccctaaccgtcacctggctgaacattcaccctattacgaagccatgaagcagaaacatactgaggtgctcttctgctatgagcagttcgatgagcttactctgctgcacctgagggagtttgacaagaagaagctcatctctgtggaaacagacatcgtcgttgatcactacaaggaggaaaagtttgaggacacatctccagctgatgagcgcctctcggagaaggaaacagaagatctaatggcgtggatgag

SEQ ID NO: 1518 - DNA, 567 bp, Mus musculus
cttatttagtttttattcataatcataaacttaactttgcaatccagctagacttgaaggggaatgaggaaaatatggaacccaaagaacttcagtgagagcagagattacaggacattgcgagcagatggggtagggacgctctcctgagctacagaaggaatggtttgatgggtaaaatgcccgcaagtcaaaagaaattagagctgtccacagtcggaaatggtgatcttcttgctggtcttgccattcctggacccaaaacgctccatggcttccacaatgttcatgccttctttcaccttcccaaagaccacatgcttgccatccagccattcagtcttggcagtgcagataaaaaactgggaaccgtttgtgtttggtccagcatttgccatggacaagatgccaggacctgtatgctttaggatgaagttctcatcctcaaatttctctccgtagatggacctgccgccagtgccattatggcgtgtaaagtcaccaccctggcacatgaatcctggaataattctgtgaaaggagggacccttatagccaaatcctttc

SEQ ID NO: 1519 - DNA, 589 bp, Mus musculus
ccgcttgctgcagccatggtcaaccccaccgtgttcttcgacatcacggccgatgacgagcccttgggccgcgtctccttcgagctgtttgcagacaaagttccaaagacagcagaaaactttcgagctctgagcactggagagaaaggatttggctataagggttcctcctttcacagaattattccaggattcatgtgccagggtggtgactttacacgccataatggcactggcggcaggtccatctacggagagaaatttgaggatgagaacttcatcctaaagcatacaggtcctggcatcttgtccatggcaaatgctggaccaaacacaaacggttcccagttttttatctgcactgccaagactgaatggctggatggcaagcatgtggtctttgggaaggtgaaagaaggcatgaacattgtggaagccatggagcgttttgggtccaggaatggcaagaccagcaagaagatcaccatttccgactgtggacagctctaatttcttttgacttgcgggcattttacccatcaaaccattccttctgtagctcaggagagcgtccctaccccatctgctc

SEQ ID NO: 1520 - DNA, 591 bp, Mus musculus
ccgcttgctgcagccatggtcaaccccaccgtgttcttcgacatcacggccgatgacgagcccttgggccgcgtctccttcgagctgtttgcagacaaagttccaaagacagcagaaaactttcgagctctgagcactggagagaaaggatttggctataagggttcctcctttcacagaattattccaggattcatgtgccagggtggtgactttacacgccataatggcactggcggcaggtccatctacggagagaaatttgaggatgagaacttcatcctaaagcatacaggtcctggcatcttgtccatggcaaatgctggaccaaacacaaacggttcccagttttttatctgcactgccaagactgaatggctggatggcaagcatgtggtctttgggaaggtgaaagaaggcatgaacattgtggaagccatggagcgttttgggtccaggaatggcaagaccagcaagaagatcaccatttccgactgtggacagctctaatttcttttgacttgcgggcattttacccatcaaaccattccttctgtagctcaggagagcgtccctaccccatctgctcgc

SEQ ID NO: 1521 - DNA, 562 bp, Mus musculus
cttatttagtttttattcataatcataaacttaactttgcaatccagctagacttgaaggggaatgaggaaaatatggaacccaaagaacttcagtgagagcagagattacaggacattgcgagcagatggggtagggacgctctcctgagctacagaaggaatggtttgatgggtaaaatgcccgcaagtcaaaagaaattagagctgtccacagtcggaaatggtgatcttcttgctggtcttgccattcctggacccaaaacgctccatggcttccacaatgttcatgccttctttcaccttcccaaagaccacatgcttgccatccagccattcagtcttggcagtgcagataaaaaactgggaaccgtttgtgtttggtccagcatttgccatggacaagatgccaggacctgtatgctttaggatgaagttctcatcctcaaatttctctccgtagatggacctgccgccagtgccattatggcgtgtaaagtcaccaccctggcacatgaatcctggaataattctgtgaaaggaggaacccttatagccaaatc

SEQ ID NO: 1522 - DNA, 854 bp, Mus musculus
  misc_feature (1)..(854): n is a, g, c, or t
gtttttcgttttttggagacagggtctcactatgtagccctaggtggcctgaaacttgctaggtagaccgggctagccttgaacttaaagagatccatctgcctctgcctctgcctctggagtgctgggataaagagtatgcaccaccatgcctggcagtccgggaatgcctacccgttggccaccatgacattaggtaggaaagcagccggaaccgctcctctctggcggctgagggtctcactgaggaactgaaccagcagatgttctacaccttctgtgctgtaggaagagaactcagagctgcttccaaggttttgacactgtgtgcagggctagaggccaatggtataggagcggccggtagggttgtgaatagaagaacagacgggggccgtcaccgcccactcgtaccacactttcttggaattgctgcatcgccagaaacgcacacagatgttctggccttcgtgcaccgtgatgggctgcttaatggggaagaagatggggaaccatgagaacatcccaggagagtgagtctctgggcggatactcagagtgatgtcccggtaaagcacagtctcaaagtagcctgcgaacgcatgaagcactgtgttcacctccacaggaaactccaaggtacagtagcggttgttgtcaatcataggatctcggttgggatggctgaaggtaaagcagggcttaggagcagagagctggtggaagttgtgcaccgaaccacataaggcatctcaaactgtgcctgtactcaggatcgcggtccttttcccgacnagcacggacctcattgtacagcttagaggaagaaatgggagcaggaaggaggtgtattc

SEQ ID NO: 1523 - DNA, 593 bp, Mus musculus
gcggcgatggcagtcggaggtgctggtggcagccgcgtgtccagcgggagggacctgaattgcgtccccgaaatagctgacacactgggtgctgtggccaagcaggggtttgatttcctctgcatgcctgtcttccacccgcgtttcaagagggagttcattcaggaacctgctaagaatcggcctggcccccagacacgatcagacctactgctgtcaggaagggactggaatacgctaattgtgggaaagctttctccatggattcatccagactcaaaagtggagaagatccgaaggaactctgaagcggctatgttacaggagttgaattttggggcatatctgggtcttccagctttcctattgccccttaatcaggaagataacacgaatctggccagagttctgaccaaccacatccacactggccaccactcttccatgttctggatgagggtacccttggtggccccagaggacctgagagatgatgtaattgagaatgccccgactacacacacagaggagtacagtggagaagagaaaacatggatgtggtggcataactttcggactctgtgtgactatag

SEQ ID NO: 1524 - DNA, 564 bp, Mus musculus
atttttatttcttcaattttttattatcaggagtgactgaaataaaaaatataattgagtcccatcattattgtcattatggaaatggctttaagagaaaactggtcagatgaatattattgcttcccacttttcaactggtaaatagttgccactgataaaacagacaagcccagagaatctgtccagaatgttcaagatatggtatattatacaacatgcctgttctcggggagaacacctaggacataattatgtgtatttcttgatctcatcatacaagacaagcacaaaggcgccacccatgcctctgagaacgttggaccatgcgcccttgaaaaaagccttgctcccttcatcgcgcgcgaccttccgccagcagtcaagcgtgcctgtgtacatgatatcagttcctttgcgtccagactgcatcatcatacgacggcgaaccgtgtcaaaaggataggaagtcaggccagcgacagatgtgacagactgtgcaatcatccagctgatgaagatgtgagtattcttgggatctgggagcattccctttgcagtgtc

SEQ ID NO: 1525 - DNA, 578 bp, Mus musculus
gggagtcaaagccggttgtcaacccagccctgtcccgcactcgcctgcctcttctttttttgctttcaacatgacagacgccgctgtgtccttcgccaaggacttcttggccggtggagtggccgcagccatctccaagacagcggtagcacccatcgagagggtcaagctgctgctgcaggtgcagcatgccagcaagcaaatcacggcagataagcaatacaagggcatcatagactgcgtggttcgtatccccaaggaacagggagtcctgtccttctggcgtgggaacctggccaatgtcatcagatacttccccacccaggctctcaactttgccttcaaagataaatacaagcagatctttctgggtggtgtggacaagaggacccagttctggcgctactttgcagggaacctggcatcaggtggtgccgctggggctacatccttgtgctttgtgtaccctcttgattttgcccgtacccgtctagcagctgatgtgggcaaagctggagctgaaagggaattcaaaggccttggtgactgcctggttaagatctacaaatctgatggga

SEQ ID NO: 1526 - DNA, 825 bp, Mus musculus
atatggcaatttttttatttgtatcaaattatagagtaccatcagtaagcaggttacagtctgaacataatgcaaatgttgcgggttaggcagctgccccaagtccatcagatgtctgaagcacatggaagagcttataaggaataattggtgtgatgaacatttctgtgccttatctgacaattatcaggtatatatatatgacatgtgcacacacacgcttccaaattaaatatatttatataaaaagctcaagaatgatgttagcattaatttctttaaaaagtctattatattaaattgcacctgcattggaagcagaaatataaaaaaaagatcaatttactaaatactgatgaatttacaaacaattgaaaatgaaattaaagtttctactgaaatgtattcctgtttgacatttaagaggcactaacaaactatgcaaataaacatttttcccagatttcagagactaaaggtcctagaagtagcactgagccctctaagttactaatgagaaccatggtgggcaaagacagaggataactctattctttcttatggaggaacgctcaggatgtggtcactgcagtctccactccacagcctgagttttctttcttccatcagtggaagtctggcttctcgggaaaggtacagccagttcgtctaatgatgacgcttgctgcgtagtggccagcgcggatgcactcagtcagaggcttgtcagagaccagttgagacagaaagctccaacaaatgcatctccagctccattggtgtcaatgatctcttcctggttttgatccaagacaggaaaagcag

SEQ ID NO: 1527 - DNA, 576 bp, Mus musculus
tgaagatggcagctgcggacgagcccaagcccaaaaagctcaaggtggaagcgccacaagcgctgagtgaaaatgtgctatttggaatggggaatcctcttcttgacatctctgctgtagtagacaaagatttccttgataagtattctctgaaaccaaatgaccagatcttggctgaagacaagcacaaggaactgtttgatgaacttgtgaaaaaattcaaagttgaatatcatgctggtggctctacgcagaattcaatgaaagtggctcagtggttgattcaggagccacacaaagcagcaacattctttggatgcattgggatagataagtttggggagatcctgaagcgtaaggctgctgacgcacatgtggatgctcattactatgagcagaacgagcagccaacaggaacttgtgctgcgtgtatcactggtggcaacaggtccctcgttgctaaccttgctgccgccaattgttacaagaaagagaagcaccttgacctggagcggaactgggtgttggtagagaaagccagagtttactacatagctggcttttttctcacagtct

SEQ ID NO: 1528 - DNA, 533 bp, Mus musculus
ccaggagcagatctactttaatgtaaaaactcgaacagaaaactggtgttagctgtaggacaacaacatcctatcatttcatatccatcagtgcaggtcagggtgttcagcttggaaccttgggacttcctcatgcgcgcacggtagctgaaggaagcctgtcttcccagcatgccaccgccgctgtccgtgcttacagcgaggcacagagccgctccagctgctcagggttgcagttactcaggaacctcagctccttcctcccttcttctgttgaagctttctcatgttgaagccagttgttctctaagtagtactggaaggaactttcaaactcctttggattatagttgggaatgaggatgggaagaaaaggctccagggcattaaatccttcctttcccagcagctcatgcggcaaataggctgttctggacttaaagagagacccggtttggctcaagctcaacacgattgcacctccatgccagtcatttgtcaccattttccttagattgtggacaagggagagt

SEQ ID NO: 1529 - DNA, 590 bp, Mus musculus
cgcttcctgagtcagataaaagttcaagagaagtatgtttggaataagagagaaagcactgagaaaggcagtcctctgggagaagttgttgaacagggcctaacccgagtgaggaatgccactgacgctgttggggtcgtgctgaaggagctgaaggctcagagcgccctagggctctttcacctcctggtggctgtggatggagtcaatgccctctggggaaggaccacactgaaaaaagaagatagaaccttgattgccccagaggaactctcccttgtccacaatctaaggaaaatggtgaaaaatgactggcatggaggtgcaatcgtgttgagcttgagccaaaccgggtctctctttaagtccagaacagcctatttgccgcatgagctgctgggaaaggaaggatttaatgccctggagccttttcttcccatcctcattcccaactataatccaaaggagtttgaaagttccttccagtactacttagagaacaactggcttcaacatgagaaagcttcaacagaagaagggaggaaggagctgaggttcctgagtaactgcaaccctgagcagctggagcg

SEQ ID NO: 1530 - DNA, 562 bp, Mus musculus
  misc_feature (1)..(562): n is a, c, g, or t
aagtatttctacacctttatttctccgtgtacagtagggaaaggaataaaataaaaatggcacaattgacacacaaaaaacatggttggggttgggaagggtggtggtaagtagatgggggaggggtccccattacagcagcaaaagccagtgacctaggatgctcccatctctcccaatatgggcaggaacaaccagcccttcttttcaggctgctgtcctgcaacaacttgtactgctccagccccttgggaggtggacagagaagtcttcccaggctacagaggaggaaccgaaccgtgctgggggaggagcctggggtcagaccatgcacagggagtgacagtcatttgcccccaccacctccctaagggagntaactttgtgggggttggagggtggacaccagaggccggcaatgcttcttcttccagcatcaggcaagagagagaacagtcagagcctcctgggcaaagtacttgacatccacatcctggtcctgggtcagcttctccaggatgggcttgacttcactctgcagggtgctgttatcaagaatggg

SEQ ID NO: 1531 - DNA, 572 bp, Mus musculus
gctgctgaggacaagtcttggcgtgttcgctacatggtggccgacaagttcacagagctccagaaagcagtggggcctgagatcaccaagacagatctggtgcctgccttccagaacctgatgaaggactgtgaggccgaggtgagggccgcagcctcccacaaggtcaaagagttctgtgaaaatctctcagctgactgccgggagaatgtgatcatgactcagatcttgccctgcatcaaggagcttgtgtcagatgccaaccaacatgtcaagtcagcactggcttcagtcatcatgggcctctctcccattctgggcaaagacaacaccatcgaacacctcttgcccctgttcttggctcagctgaaggatgagtgtcctgaagtccgactgaatatcatctccaacctggattgtgtgaacgaggtgattggcatcaggcagctctctcagtccctgcttcctgccatcgtggaactagctgaagatgccaagtggcgagtgcggctggccatcattgaatacatgcctctgctggctggacagcttggtgtggaattttttgatga

SEQ ID NO: 1532 - DNA, 572 bp, Mus musculus
ttttggctgtcctctgcttgggaacagccttagctactccaaaatttgatcaaacctttagtgcagagtggcaccagtggaagtccacacacagaagactgtatggcacgaatgaggaagagtggaggagagcgatatgggagaagaacatgagaatgatccagctacacaacggggaatacagcaacgggcagcacggcttttccatggagatgaacgccttcggtgacatgaccaatgaggaattcaggcaggtggtgaatggctaccgccaccagaagcacaagaaggggaggctttttcaggaaccgctgatgcttaagatccccaagtctgtggactggagagaaaagggttgtgtgactcctgtgaagaaccagggccagtgcgggtcttgttgggcgtttagcgcatcgggttgcctagaaggacagatgttccttaagaccggcaaactgatctcactgagtgaacagaaccttgtggactgttctcacgctcaaggcaatcagggctgtaacggaggcctgatggattttgctttccagtacattaaggaaaatggaggtctg

SEQ ID NO: 1533 - DNA, 477 bp, Mus musculus
acacacacactgagctaaaatttatttttaagaggtaaagaaagttttatacaacctttatataaaacaaatattccagactcagaattaagcactaagttttcaatattataaagctgtttataacaggagttttaagtagtggtaacatttaacccatgtaaaaatggcaacagaattcaaatcatgacttggatcctcaatgattcaagtaccatggtttgactcaataagggtttggtcagttttaagctgaattcctttggacatagtgtccataagtcctcattaccgctacccatcaattcacgacaggatagctggccgcggtggcaagtccacagtggttgtcccggtctttggctattttgatgtagccttccataccccattcacttccccagctgttcttgacaagccaatatttattcttatttgaatctgttccttcatagccatagcccaccaacagaaccc

SEQ ID NO: 1534 - DNA, 569 bp, Mus musculus
atttcaagatactttattttcacaatgggtcacaacataagcttctggcccattctgccaatgtacaagctacaaacgcttgctcagcagctgaggggcacacgttagtatcatgtctgaaaagtgaataaaaatccatgtaatacaaatattcaaagtttccataggaacacagtaagtgtgaccccccatctcctagccttccatactgcattggtgccaaccctactctcacaaagacatcccaaactagcagtaagttaaatggtccccccaaatgccttaacacaagctaaacttgcaggcaagagctacaagaatggcatctacacattgatcctagcagaagcacaggctgcagggtgacggtccatcccgctctcctgggcacaagacatgggcagcgtgccatcatcctgctcctccacctccggcgggaagccatggctctggatctgcttcatgagttgccacattggccgtgacattacatagtagatgtttggcctctggaacccattgaaagtagaagcagcagcaacagtgtatgcacccatgttctcaaacag

SEQ ID NO: 1535 - DNA, 550 bp, Mus musculus
aggagctggtgataatttgattccatctccaggttccctgtaagcacatcgagaaccatgagcagctttactaaggacgagtttgactgccacatccttgatgaaggctttactgctaaggacattctggaccaaaaaatcaatgaagtctcttcctctgacgataaggatgcgttctatgttgcggacctcggagacattctaaagaagcatctgaggtggctaaaagctcttccccgcgtcactcccttttacgcagtcaagtgtaacgatagcagagccatagtgagcaccctagctgccattgggacaggatttgactgtgcaagcaagactgaaatacagttggtgcaggggcttggggtgcctgcagagagggttatctatgcaaatccttgtaaacaagtctctcaaatcaagtatgctgccagtaacggagtccagatgatgacttttgacagtgaaattgaattgatgaaagtcgccagagcacatccaaaggcaaagttggttctacggattgccactgatgattccaaagctgtctgtc

SEQ ID NO: 1536 - DNA, 556 bp, Mus musculus
cggattgtcaagacgtttaatatttggagagaaggacatgagacaacacggtgttcatctcgggacaggggttttagagtcctcagatcactaggtagaaacctggctctgtccatccaccgctggaagggggacacttccatcccagccaccctttcagactctgtctctcctgcgtcacctcactgagacttagcaccttgggctcgtttttctcttgggctcatctctgcatttttccttgcattgatgccccttctctccccctgacagttcccagaacgaaagtggtccagttatggatgctgccccaggaggaagcatctgtcctcccatcccacggatcaaaggcttttcccagtccatgctgcttctctgcttcatttagctctctgtgctggtcacaaggaagctgaaagggacagcccaggaggagcaggcacacttggctcagggcatccaagtatctgggtatcaggtaaggtagggctgacagtcttctgggagccatttgacactggatcttccctgagacagttctcatcagctttggcaa

SEQ ID NO: 1537 - DNA, 591 bp, Mus musculus
gctggggccttggtgggagcagggggcctgctcacttcatttgctcggctgctggtagtcagtgtgcactgctctgcccaccccgcccctggcaggaccctgacgagtcatacagcacccaggggaagcacagccaggggaagagaggggtgcctgcggccctgtgggatggtggtctgtagcactcttctaaagtgaacaggccatggcgcaggctgctgggctgccacaggccagcactgcttctggccagccctacgtgagcaagctggttctgcttggaagcagttctgtgggcaagaccagcctggccctccggtacatgaagcaggacttcagcaatgtcttgccgactgtggggtgtgccttcttcacaaaggtgctggacttgggctcctcatctctgaagcttgagatctgggacacagccggccaggagaagtaccaaagcgtctgccacctctacttcaggggtgccaatgctgcgctcctggtttatgacatcactcggaaggattcctttcacaaggcccagcagtggctggaagacctggagaaggaattccagccaggagaggtggtggtgatgct

SEQ ID NO: 1538 - DNA, 852 bp, Mus musculus
ggtatttactgtgtgtttattgaatacacaacatagaaaaggtaaccattacagctcccagtacatgaagagagctggaaagagagacgattctaggtccacgtgggtttgggtcattaaaaaaccacaatccaagcgtatttctggcgatgatgtcacgtgggtgggcttgtcgctattcaagtttgtccttcctgtctttaggcgtctagactcaggagtgagagggcctctgggtggatttccacacaattttctccagggtggcattctcatcgaaggaccagttcctcccctggtctgccaatcagttgcccgtgcagccgtggcttatacctgaggaatgggataggaggcacaagcagccaggccacacatgttcttcccacgttcaatgaggaagtacccattctccccccactgggagccccaagagtttttcacaatccagtagagtaatccattctgttctccatagccaaccgccaggactgcatggtttactttatctggagttttatgacaggatttactggagtagacgccacttttatacatcaaaaaatcttcagtcacctcaaaggcgaacgtcacagggttgtatagagccacagcctcaaccattgcagcctcgtcattgagtgtgatgttgacaacattcttgacgaatgcaacagctttttgggggttgaatctgcatgaactatccttgcctatgtaagggtagctgtcttcttccatgatgcccttgttgtataggatgtactcgaaggcctggctggggagactcctttgcagccatgatgttgaggcttgggcacatccacagctgctgtcagcaaagacagcatt

SEQ ID NO: 1539 - DNA, 574 bp, Mus musculus
ggactagccttcagggtcagaccctgagaacccttcttcccaagagcaggagtgtaatggccacagggggcaggagaggaaccatcatcacctaggcggaggccagagtcgccccacctcctttccacaggctgggctcagagggcactcggtgggaccgggcagtgagcgccgagatgtgggctgcgctgccgctgctgtgcgctggggcctggctgctgagtactggggccaccgccgagctgaccgtgaacgccatagaaaagtttcactttaagtcatggatgaaacagcatcaaaagacgtacagctcggtggagtacaaccacagactgcagatgtttgccaacaactggaggaagattcaagcccacaaccagaggaaccacacatttaaaatggcattgaaccagttttcagatatgagctttgctgaaataaaacacaaattcctttggtcagagcctcagaattgctcagccaccaaaagtaactacctccgaggtacaggcccctacccttcctccatggactggaggaagaaaggaaatgttgtttcgccagtgaaaaatca

SEQ ID NO: 1540 - DNA, 756 bp, Mus musculus
gcacaggaagagacatttattttgggagcagtctttgcaaagataaagctattaacactaaagtgatcccccaccccccccacacagaaatcataagctcttgtgaagtaggaaacattctcaaggcgctaaggcacgcaggaacaagatgggtggcagtttccttggcttagttagagcttggctttcttcttaaaagattcctttatcctcttgacaatagaaaggtccccagctcctacaggccagttgtcatgatccggtatgctgaaggcgtgagtgtacagagcctggcctccatccacattgatcaactgtccagtgatataggaagccgcaggggacagcaggaaacataccagaggggagatctcctcggggactccaaggcgcttagctgggatactgtcaaaggccatctcaaataaggtttgtcccatttcgccatagttgtcaacagcagtctgggagtaaatggtcccaggagcgacacagttgatcctcactccgctgctggcccacgccaaagccatggattttgtgaggttgtaaacaccttctcttgccgctccagtgtgcgcggctgttggaaacccattattaagaaggacaatgatattgacaatcgaccctccgtgctctctcatccaggaattgtaaacttctttgcacatgtagaaggtgcctgtcaggttggtttctatcacagcatgccatcccttcgcagtgatgtcttccacaggagccatgaactgg

SEQ ID NO: 1541 - DNA, 572 bp, Mus musculus
tttggttacgtggccaaggactgctactaatagagctacttctgaggaacacgtggtctagctttagcaagaactcagagacagacactttgtggccatgggctcttggaagactggtcagagctacctagcggccgggttgctgaagaaccaagtggccgtggtcaccggcgggggcacaggcattggaaaagccgtctctcgggagctcctgcacctggggtgtaacgtggtcattgcttcccggaagctggacagactaactgctgctgtggatgaactgagagcctctctgcctccctccagctccgctgaagtctccgccatacagtgcaacatcaggaaagaagaagaggtgagtaatctggtcaaatctaccttagctaagtatggtaagatcaacttcttggtcaacaatggaggaggccagttcatggctcctgtggaagacatcactgcgaagggatggcatgctgtgatagaaaccaacctgacaggcaccttctacatgtgcaaagaagtttacaattcctggatgagagagcacggagggtcgattgtcaatatcattg

SEQ ID NO: 1542 - DNA, 889 bp, Mus musculus
  misc_feature (1)..(889): n is a, c, g, or t
gatttaaaaattagtatttttatggagtccagatggggaaagtagatttaaagaaattcttcatttcatcaaagtttcagaaagcaccaaatcctgtcctgaagacacttttagatacacattttgggtttttattgctgattacagactttaactacgaaatgtgcattgcaagtcaacaagactttttcatatgtccaataaaagtttaaagaaacagacaaaatccacaaaggacaagagaaatacaagcttcaaaacaatagaaattaagtctccacagtcaaggcctgccaaaaatttgaaataacccaaaccgtgcaaatgttcaacagagaccatggccatacatgggattgtaaatacttgtcccattaaggacaaagtagacaagttatcagttatattgatgatcaagacaaacaacctcattggcttacagcaatattttctgtcctctgtaagagtttgtgacaagttcaagaggttggaaacctgtgttgcttcagcagggccgtgctcagaagtccacatggttctaagaaaccatcctcagccgctgcatggtcaggaagatggagttcacaacagggtcacactggctgcctgcaggtaaccttggagatactgcaagcttctgcattgaggctggtgctcaccatcgagggaacccttccaggacaagcagttgacagtttgtgaagtgactgtgccagatggattttgggggtgtttacatctgacctacaggatcatgttcctttttaccagcaagtgccagctgtgagaaggcagtctggtatcctggtgtatcctctatgtcaatgaatgctcctcatcaggaatgctgtcatnctcaggtaanntcaacaggtccatgagagattgt

SEQ ID NO: 1543 - DNA, 567 bp, Mus musculus
  misc_feature (1)..(567): n is a, c, g, or t
gaatatattatgaaagctatcatgagaagtttctccctcctgcaagaggccatcatcccctatatccccactctcatcacgcagctcacacagaagctgctggctgttagtaagaatcccagtaaacctcatttcaatcactacatgtttgaagcaatatgcttgtctataagaataacctgcaaagctaaccctgctgctgttgtgaattttgaggaggctctgtttctagtgttcactgagatcttacaaaatgatgtacaagagtttatcccatatgtctttcaagtgatgtctttacttctggaaacacataaaaatgatatcccgtcttcctatatggccttgtttccccacctccttcagccagtactgtgggaaaggacaggaaacatccctgctctagtgaggctgctccaggcattcttagaacggggctcaagtacaatagcaactgctgcagctgacaaaattcctggnattactgggtgtcttccagaagctgattgcatccaaggcaaacgatcaccaaggtttctatcttctcaacagtataatcgaacacat

SEQ ID NO: 1544 - DNA, 872 bp, Mus musculus
aggcaacctagtatttaatagcaagatgctatttcacaaaaacaaaaggaaacaaagaccttaacacacacacacacacacatatacacacacacacacacacacatcagtgtttcccaactaacagttgagtcctaaatgcagtctgtgcaacagcacatgacttgtggctatgttcacacagtaaaccatagaaacacactggctctgatggctccctgcaaagacagacagactgatccagtgtttacttaatgttgccaccgctggtatcttcgctcagcaggactttcgagatgcttaccgagcgtccacagtccaggaaagacagacccaatgcaatcaaacactgccaacccaagtagaacacaaaggtcaaataagccacgctaaccactgcagccaccacatagagtgccacatgccctagctcctggacataaaccactacaaagtacatgttgatggagcagacgatcaggaccaggatgccaccggcaatcctccagcctattccattggaaaactcactcatcactggccgcacgttgtgaacgtgaggatgggtatgagagcaaaggggagctgtaagtctgcaggacattcaggaagtcattcatccccgttaggtgctccacatcctggaagacagcgacgagcagggtggggatgatggcgatagaccgggtcaggatcactcgggcaaagcgcgaccattttaggttcaggaatgcgtccatgacaaactggccagaataggttccagtcatggtggagctctgaccggcagccaggatcctcactgcccagatgtagagagctgcatgcccgaagtaacatgcaagcacaacacgccctttgtagatgtcaca

SEQ ID NO: 1545 - DNA, 585 bp, Mus musculus
tatggagtcgccggcgcggcgtgtgtggaggtggcggagccgaatcctattctaagagcacagaccctcaggtatctaccatggtgttggatcctaaagaaaagatgccagacgatggcgcttctggggaccatggagactctgccagccttggcgccatcaaccctgcctacagcaactcatccctcccacattccactggagactctgaggagcccttcaccacctactttgatgagaaaatccccattcctgaggaggagtactcttgttttagctttcgtaaactctgggcgttcacggggcctggctttcttatgagcattgcctacctagacccaggaaacatcgaatctgatttgcagtctggagcagtggctggatttaagctgctctgggtgctcctcttggccaccattgtggggctgctgctccagcgccttgcagcgagacttggagtggtcaccggcttgcatcttgctgaagtatgtcaccgtcagtatcccaaggtcccacggatcatcctgtggctgatggtggagttggcaatcattggttctgacatgcaggaagtcattggctcag

SEQ ID NO: 1546 - DNA, 673 bp, Mus musculus
ggatgtatgatggtttttatttacaactttattggcaaaaaaggggagaacttcaaacagctttaacacggcactgtagctgaccctgtcaggttgacaagtcccattctcagtgtccacctaattgtccacagaagtacaatactgaatctgcatatgcagtttcctttatcaagtacagtgctcacctttcaggcagtctctaaaacatataaatacaaaggaaaggacaccactcattaaaaactgcatcaaacgcaagtgccttaagtgtgaatctgttgtttctggaaattacacatgcccaatgaaaaccaaaagctgggaaagcggttacacttcctacatgagtggacagttgcaacgacaatcatcttctgtaatgaccatttttaatttatcaccaactactctgaacttactatgagatgtagtcaaggtcagaagagaggacgcagggctagtactccttttgtggaggacagaatccctccagggtcatcatggggaaagaaacatcctgctgattctaggtggccaaacaattaatgagtcaatctcagttcatgttgatcctagtgagctgacctagttttcatcctcatcattcttctaagtcaagagtgttcaattcctcttctagttcatccagatcttcgccagtggacaggtt

SEQ ID NO: 1547 - DNA, 569 bp, Mus musculus
tctccagaaggttctgccgattccccccagctctggagagtcggctctgcgtcgtgccgccatgatgggccaccgtccagtgctcgtgctcagtcagaacacaaagcgtgaatctggaagaaaagttcagtctggaaatatcaatgctgcaaagacaattgcagacatcatccggacctgcttgggacctaaatctatgatgaagatgcttttggacccaatgggaggcatcgtgatgaccaatgatggcaatgccattcttcgagagattcaagtccagcatcccgcagcaaagtccatgattgaaattagcaggacccaggatgaagaggttggagatgggaccacatcagtaattattcttgcgggagaaatgctctctgtggctgaacacttcctagagcagcagatgcacccaacagtggtgatcagtgcttaccgcatggcactggatgatatgatcagcactctgaagaaaatcagtactcctgttgatgtcaataaccgtgagatgatgttgagcatcatcaatagctctattactacaaaagtcatcagtcggtggtcct

SEQ ID NO: 1548 - DNA, 591 bp, Mus musculus
gatttgtaataactattttaataacagtgttaacatcttaacctaaacttcactgtcacagaaaatcccataaaactcagaaaatattcaggttgtggtgaagaggaacaggaacaagccttttgaaaacttcaacgcactggatggaatggctcaagaatttcagcataggttttcttctctttttcaggaaaatcttctgggtgtaattttatataaccaaacatgtcatggtccttcacagcatacaaatagttttgacgttttaaataaaggtatccagcaaagacaaaggacgtaacgaacagaagctggcggtgcaaacctgctctcatcaccggtcgcatccgcagcatgttgtccatcaggcccgtgcagtagcccaacaagcccatgtagacaagccgcgggtcgttcagcttgggcgggggcaggctccgggcctcgtccggcaagaattttaagggctcatggcccggccggccgttcatcatcttgaggcaggttccacgagaggtttgacctcgactccaactataggaaaaacaacgactccaaacgccgtgaccgagctaccgtccggatagtcga

SEQ ID NO: 1549 - DNA, 522 bp, Mus musculus
gacggtagctcggtcacggcgtttggagtcgttgtttttcctatagttggagtcgaggtcaaacctctcgtggaacctgcctcaagatgatgaacggccggccgggccatgagcccttaaaattcttgccggacgaggcccggagcctgcccccgcccaagctgaacgacccgcggcttgtctacatgggcttgttgggctactgcacgggcctgatggacaacatgctgcggatgcgaccggtgatgagagcaggtttgcaccgccagcttctgttcgttacgtcctttgtctttgctggatacctttatttaaaacgtcaaaactatttgtatgctgtgaaggaccatgacatgtttggttatataaaattacacccagaagattttcctgaaaaagagaagaaaacctatgctgaaattcttgagccattccatccagtgcgttgaagttttcaaaaggcttgttcctgttcctcttcaccacaacctgaatattttctgagttttatgggattttctg

SEQ ID NO: 1550 - DNA, 584 bp, Mus musculus
gcagctgcctggcatttgtgtggtctcgtcgtcagcgcagctgggcctacacacaagcaaccatgtctaagggacctgcagttggcattgatctcggcaccacctactcctgtgtgggtgtcttccagcatggaaaggtggaaattattgccaatgaccagggtaaccgcaccacgccaagctatgttgctttcacggacacagagagattaattggggatgcggccaagaatcaggttgcaatgaaccccaccaacacagtttttgatgccaaacgtctgatcgggcgtaggtttgatgatgctgttgttcagtctgatatgaagcactggcccttcatggtggtgaatgatgcaggcaggcccaaggtccaagtggaatacaaaggggagacaaaaagtttctacccagaggaagtgtcctccatggttctgacaaagatgaaggaaattgcagaagcgtacctcggaaagaccgttaccaacgctgtggtcacagtgcccgcttacttcaatgactctcagcgacaggcaacaaaagatgctggaactattgctggcctcaatgtacttcgaatcatcaat

SEQ ID NO: 1551 - DNA, 72 bp, Mus musculus
gtgttattttaaatatttttattattccatgtgactagtatagggaccctgaaggaacaaagctacaccttc

SEQ ID NO: 1552 - DNA, 828 bp, Mus musculus
ggattatcttagtgatggattcgacccattttttcattgctttacctcttactgttccaataaattcctccattctctgtaaaaggtctgcatctctttcaaagtcatagaaatggtgctccacccagtgccgacacacatttaacaccctcaactgcacaggctgaatatattcctttctaaacctcttcagctctgcactcaggggctgatctccattctctatagctatgcgatcagcttctgttggctcaggctctggaatttcaaatctttctatcagaagactcagtagttcttgaggtctgcaaaaggacctgtatgttgtaagaaacgtccgaacaaaatttggatctgcgtacatgtggtaggtaagcctctcaatgagcttaagcactgtccctgccttgataatggggatcccagctttgggctgcacattctcttcgaatagaatattctcctcggagtcaggttctgcaaacctgtacacttcagcactgggcagcctcatctgctcctccttctcctcctgcagcaccgttacgtccagcatcctctccagggtgctgcggtactgcaaagagatcagtgctgccatccagttgtttttctcttcagctgacttggcagaaaatataacactattgccatctttcagaatgatttcaaaagcatgcttgtactcactggtgtcatctttatcattaatctgtacctttcgcataaaaaacttttctttaagccggtattctgcactgctagcaccagggagtcttggctgcccatggctttgatttacagcagatcattaagccatcgaagaga

SEQ ID NO: 1553 - DNA, 551 bp, Mus musculus
gaagactaagtgagtctgcatgtcggttttacagccagcagatgaaggggaaacagctagccatcaagaagatgaacgagatccagaagaacattgatggctgggaggggaaggacattggacagtgttgcaatgagttcataatggaaggaactcttacacgtgtaggagccaaacacgagagacacatatttctcttcgatggcttaatgatttgctgtaaatcaaaccatgggcagccaagactccctggtgctagcagtgcagaataccggcttaaagaaaagttttttatgcgaaaggtacagattaatgataaagatgacaccagtgagtacaagcatgcttttgaaatcattctgaaagatggcaatagtgttatattttctgccaagtcagctgaagagaaaaacaactggatggcagcactgatctctttgcagtaccgcagcaccctggagaggatgctggacgtaacggtgctgcaggaggagaaggaggagcagatgaggctgcccagtgctgaagtgtacaggtttgcagaacctgac

SEQ ID NO: 1554 - DNA, 10 bp, Homo sapiens
tcgactatcc

SEQ ID NO: 1555 - DNA, 69 bp, Mus musculus
gaataaagacatttgtacattcctgatgctgggtgcaagagccatataccagtgtcctgctttcaactt

SEQ ID NO: 1556 - DNA, 579 bp, Mus musculus
ggggatggcaccaccactgccactgttctggcacgatctattgccaaggagggctttgagaagatcagcaaaggggctaatccagtggaaatccggagaggtgtgatgttggctgtggatgctgtaattgctgaacttaagaaacagtctaaacctgtgacaacccctgaagaaattgctcaggttgctacaatttctgcaaatggagacaaagacattgggaacatcatttctgatgcaatgaaaaaggttggaagaaagggtgtcatcacagtgaaggatggaaaaaccctgaatgatgagctagaaattattgaaggcatgaagtttgatagaggatatatttccccgtattttattaacacatcaaaaggtcaaaagtgtgaattccaagatgcctatgtcttgttgagtgaaaagaaaatttccagtgttcagtccattgtccctgctcttgaaattgctaatgctcatcggaagccattggtcataatcgccgaagacgttgacggagaagctctaagcacgctggttttgaacaggctaaaagttggtcttcaggttgtggcagtcaaagct

SEQ ID NO: 1557 - DNA, 580 bp, Mus musculus
acgagtactgcgtgcagcagctcaaggagtttgatgggaagagcctggtctcagtgactaaggagggcctggagctaccagaggacgaggaagagaagaagaaaatggaggagagcaaggcaaagtttgagaatctctgcaagctcatgaaggagatcttggacaagaaggttgaaaaggtgacaatctccaataggcttgtgtcttcaccctgctgcattgtgacaagcacctatggctggacagccaacatggaacggatcatgaaggcccaggcactgcgagacaactctacaatgggctacatgatggccaaaaaacacctggagatcaaccctgaccaccccatcgtggagaccctgcggcagaaggctgaggcagacaaaaacgacaaagctgtcaaggacctggtggtgctgctgtttgaaactgctctgctctcctctggtttcccacttgaggatccccaaacccactccaaccgcatctaccgcatgattaaactaggcctgggcatcgatgaagatgaggtcactgcagaggagcccagtgctgctgttcctgatgagatcccccctct

SEQ ID NO: 1558 - DNA, 481 bp, Mus musculus
  misc_feature (1)..(481): n is a, c, g, or t
gtataaaactgcatcttctttattttgcatacttttaattttagaacaaaataaaacaaacaaaaaaaccacaatacataacacccaaccctgctattctgtgggaggggatcttcctgccttaaggcacaggacaggatagaagattcttgtagacatgagcagagagccaggtgggtcagggctgctgggggagccacggggatactatacagagggcagggcttcttccaggaggctttaatccacctcttccatgcgcgaggcatcctcatcgccttccagaggggggatctcatcaggaacagcagcactgggctcctctgcagtgacctcatcttcatcgatgcccaggcctagtttaatcatgcggtagatgcggttggagtgggtttggggatcctcaggtgggaaaccagaggagagcagagcagtgtcaaacagcagcnacaccaggtccttgacagctttgtcgtttttg

SEQ ID NO: 1559 - DNA, 517 bp, Mus musculus
cttcagatccactgagtctggagagacgctacgtgtcccgggcttagatgctggactctttagggagcaggtccacattggtgacggaggtcaccagagagacgagacagtccgaggtagtgccgttgaccgacctcctgatcagggatacccgctcttctacacagcctgcagaaaggcgagcctctgcatcatggtcccagcactcctcgatggtcacgcagagctgggccaggcccgggtgtttcagccagtgatccttaatcgtgggcctcatcttcttgtggacaaccacctcctgaagctcctccagcgaagggtgctggccaatctcctcctcgaagggcagcatgtactcatcgacaggcccgtctgcagccttgcaccgagagacgagctcccacagcaccaggcccatggcgtacatgtcgatacgcaggaaggcgtctctctggaagttgatggctccttgcagcacctcaggggccatgtaccgtctggtgccaacctgtccatg

SEQ ID NO: 1560 - DNA, 499 bp, Mus musculus
aagaagggctgctggctagatgacttcaattgctacgacaggcaggagtgtgtggccaccgaggagaacccccaggtgtacttctgctgctgcgaaggcaacttctgcaacgagcgcttcacccacttgccggagcctgggggcccagaagtcacgtacgagccacccccgacagcccccaccctgctcacggtgctggcctactcgctgctgcccattggaggcctctctctcatcgtcctgctggccttctggatgtatcgtcatcggaagcctccctacggccatgtggacatccatgaggacccggggcctccgcccccatcccctctggtgggcctgaagccactacagctgctggagatcaaggctcggggccgctttggctgcgtttggaaagctcagctcatgaacgactttgtggctgtgaagatcttcccacttcaggacaagcagtcgtggcagagtgaacgggaaatcttcagcacacccggcatga

SEQ ID NO: 1561 - DNA, 498 bp, Mus musculus
acagattaaacactttaatctaacagtggcacgtaacactgcacagggagtcacagctcccaaaggttccttccaggtcaaagaagttccagaaatatctagggttgctggtcccctgcctgtgagaacaagagtaagcaggtagaaaaccagcaccgtcctgtcactcatagatccagttctgcgcacagctcttgtactccaccagctcctcaggctgaaaccacaagctgatctccttctctgcgctctttacagaatcgctgccatgaatgatgttcctgccaacttggatgcagaagtctcctcgtatggtcccaggcttagagtctgcggggttggtctctccaagcatcacgcggcctgtcttcaccacattcagaccctcccagaccatagcaaccactggtcctgagtgcatgtatttcaccaggccagtaaagaaggggcggtccttcaggtcagtgtagtgctccttgagaaggtcctctgaagcct

SEQ ID NO: 1562 - DNA, 526 bp, Mus musculus
gggagcgtttccggtgcgggcagtcgcagccggcggtaaagccttgtcatctgaaggggaccatggccaacagtgagcgcaccttcattgccatcaagcctgatggggtccagcgggggctggtgggcgagatcatcaagcggttcgagcagaaggggttccgccttgttggtctgaagtttctgcaggcttcagaggaccttctcaaggagcactacactgacctgaaggaccgccccttctttactggcctggtgaaatacatgcactcaggaccagtggttgctatggtctgggagggtctgaatgtggtgaagacaggccgcgtgatgcttggagagaccaaccccgcagactctaagcctgggaccatacgaggagacttctgcatccaagttggcaggaacatcattcatggcagcgattctgtaaagagcgcagagaaggagatcagcttgtggtttcagcctgaggagctggtggagtacaagagctgtgcgcagaactggatctatgagtgacagga

SEQ ID NO: 1563 - DNA, 557 bp, Mus musculus
tttgacacaggagtttgttactagcttaaaatcttaaatgtaggacctttgtcttatactgttgtgtggcattaagtcatggtgacactaacttgtgtgctcaggtggcaggtaccatgaagctggagttggctcagtaccgggaggtggctgcgtttgcccagtttggttctgatttggacgctgccgctcaacagctcttgagtcgtggtgtgcgtctgaccgagttgctaaagcaaggacagtactgtgagttgttttcatttggtcaggttcctgctgtaattagggtctgtgctgtaccattaatgtagcctgtaccaccatttgaatgaagtggtgaaattagtgaccagaaatatatttaatgcctctttatgtataaatgtggaatttaaaagaatattggcatgctttttatcttagctaaaaaaatgatatttttattttgtgacaaattacaccacaaatgctgtgtaacactgccagggcataagcagtgcttataggctgtacccaaaggtcacgattccgttttttcgggaggatgggaaaga

SEQ ID NO: 1564 - DNA, 44 bp, Mus musculus
cttttttatttttttttttttttttttttttttttttttttttt

SEQ ID NO: 1565 - DNA, 465 bp, Mus musculus
gcttcagctgctgtttattgacattcaggtgggcactatagcaacaggcctggagactctgcagaatacaaggtggagagtggagtgtctgcagtgacagaagtggagtgcacaagaagtggggaggccaaagctgttgggaaagcaggtcagggccagggccagaagtcgtcatctacactgggaccctgggccccacaccctcagcccctactcttttgctgtctcctgactccaggctagggctgggaattctgacaactttctacagaagcaaagcccagagatgctgccgcccttctgtgataaagtcagggtttccagtcctgcattcctcctccacccctggctcaggtagggccctgaataatagctggtctctattgcatgttttagaggcattaattttccctggtgtcccagcccaccagcgccacactatggcccagagtgagcactacaagc

SEQ ID NO: 1566 - DNA, 575 bp, Mus musculus
gtaaacttggccatggatgttggcaaggcccgaggcttcttcaagaagggagatgtggtcattgtgctgaccgggtggcgccctggctctggattcaccaacaccatgcgtgtagtgcctgtaccttgatggccctctggagcccctcttctagcccctgtcccttcccctcccctatcctttccattaggccagcaacgcttgtagtgctcactctgggccatagtgtggcgctggtgggctgggacaccagggaaaattaatgcctctaaaacatgcaatagagaccagctattattcagggccctacctgagccaggggtggaggaggaatgcaggactggaaaccctgactttatcacagaagggcggcagcatctctgggctttgcttctgtagaaagttgtcagaattcccagccctagcctggagtcaggagacagcaaaagagtaggggcttgagggtgtggggcccagggtcccagtgtagatgacgacttctggccctggccctgacctgctttcccaacagctttggcctccccacttcttgtgcactccacttctgtcactgc

SEQ ID NO: 1567 - DNA, 542 bp, Mus musculus
gtaaacttggccatggatgttggcaaggcccgaggcttcttcaagaagggagatgtggtcattgtgctgaccgggtggcgccctggctctggattcaccaacaccatgcgtgtagtgcctgtaccttgatggccctctggagcccctcttctagcccctgtcccttcccctcccctatcctttccattaggccagcaacgcttgtagtgctcactctgggccatagtgtggcgctggtgggctgggacaccagggaaaattaatgcctctaaaacatgcaatagagaccagctattattcagggccctacctgagccaggggtggaggaggaatgcaggactggaaaccctgactttatcacagaagggcggcagcatctctgggctttgcttctgtagaaagttgtcagaattcccagccctagcctggagtcaggagacagcaaaagagtaggggctgagggtgtggggcccagggtcccagtgtagatgacgacttctggccctggccctgacctgctttcccaacagctttggcctcc

SEQ ID NO: 1568 - DNA, 452 bp, Mus musculus
gcttcagctgctgtttattgacattcaggtgggcactatagcaacaggcctggagactctgcagaatacaaggtggagagtggagtgtctgcagtgacagaagtggagtgcacaagaagtggggaggccaaagctgttgggaaagcaggtcagggccagggccagaagtcgtcatctacactgggaccctgggccccacaccctcagcccctactcttttgctgtctcctgactccaggctagggctgggaattctgacaactttctacagaagcaaagcccagagatgctgccgcccttctgtgataaagtcagggtttccagtcctgcattcctcctccacccctggctcaggtagggccctgaataatagctggtctctattgcatgttttagaggcattaattttccctggtgtcccagcccaccagcgccacactatggcccagagt

SEQ ID NO: 1569 - DNA, 442 bp, Mus musculus
cgagggaagaacgtattgtatctgtgtgcccctgaggcctgccagctttgccttgggggaggtgacagtgttgctctaccctctcctcctggagaagatagtgctggctgggaaatggaggcacaggggacattaaatggcacatcgtgagctatcagcacagacaccaggcaagggacgagatgcaaaggcagaactaggagtaacctgctggcaggtccgtcatgaaggctgtacccaccttgctgatcccggcacaggacaccctttaggagagggcaaagggacagagggaccaagtggaagtgtgtgtccagggagccatggcagcaagcctctttattctgaggcccttgagtccctggccctgtcagagcaattcagaagggcagggctatgctggcagtcagccctgctggtgcccacatacctgccctccctc

SEQ ID NO: 1570 - DNA, 590 bp, Mus musculus
aaggctcgcttcagcatgccaggggacaatgaaggcttgtggtacagctgggacctggggcctgcccatatcatctcattctccactgaggtatacttctttctgcactatggccgtcacctgattgagaagcagttccgttggctggagaatgacctccagaaagccaataagaaccgggtggcccgaccttggatcatcacgatgggtcatcggcctatgtactgttccaatgcggacctggacgactgcacgaggcacgaaagcagggtccgcaaaggcctccacggcaagttgttcgggctagaagaccttttccataaatacggcgtggatctggagttctgggctcatgaacactcctacgagcgactatggccaatttacaactaccaggtatttaatggaagcctggaaagcccctacaccaaccctcgaggcccagttcacatcattacaggatctgcgggttgtgaagagctgctgactccctttgtcaggaaacccagaccgtggagcgccgtgcgcgtgaaggagtacggctacactcggatgcacatccttaatggcacccatatgcacatccagca

SEQ ID NO: 1571 - DNA, 487 bp, Mus musculus
actcaaactcagttttattaggacactaataaaagcagataaaaaaaaaagtccgcacagtgaaaggaggacacttatgctgtgacagatcaggcacattagtgaggagaattcttcagtgtataaaatgtaaacatttgccctggggtttcccacagagggcacagtccacgaggacttatttggaacaaaaagaatgtctattgaattcccagcataggctctgactgctgcaaacttcttgaattaaaatgttaaaattgctagcgcaccccacattttctatccggcaaactaaatggctcccaatcaaggcaacacgaacagccactgccttgccgtacagcaggtggccgccactcaccatgctaattgtgcttacattaccttgaaagattataaaaatatacagcgtataaaactcatgtgtgagccacgtaaaggagaagaaatatccttgcttgtcaaatgctccagcaagagacat

SEQ ID NO: 1572 - DNA, 576 bp, Mus musculus
cgagtcagaagacaaggcagagctcgacagattctgtgatgctatgatcagcatcaggcaagaaatcgctgacatagaggagggccgcatcgacccgagggtcaaccccctgaagatgtctccacactccttgacctgtgtcacatcctcctgctgggatcggccgtattctagagaggtagcagcatttccactgccctttgtgaaaccagagaacaaattctggccaaccattgcccggatcgatgacatctacggagatcagcacttggtctgcacctgcccgcccatggaggtctatgagtctccattttctgaacagaagagggcttcttcttagtcctccctcctacgttcaaagggctgacccgatgtctcttgctggagcatttgacaagcaaggatatttcttctcctttacgtggctcacacatgagttttatacgctgtatatttttataatctttcaaggtaatgtaagcacaattagcatggtgagtggcggccacctgctgtacggcaaggcagtggctgttcgtgttgccttgattgggagccatttagtttgccggatag

SEQ ID NO: 1573 - DNA, 581 bp, Mus musculus
cgagtcagaagacaaggcagagctcgacagattctgtgatgctatgatcagcatcaggcaagaaatcgctgacatagaggagggccgcatcgacccgagggtcaaccccctgaagatgtctccacactccttgacctgtgtcacatcctcctgctgggatcggccgtattctagagaggtagcagcatttccactgccctttgtgaaaccagagaacaaattctggccaaccattgcccggatcgatgacatctacggagatcagcacttggtctgcacctgcccgcccatggaggtctatgagtctccattttctgaacagaagagggcttcttcttagtcctccctcctacgttcaaagggctgacccgatgtctcttgctggagcatttgacaagcaaggatatttcttctcctttacgtggctcacacatgagttttatacgctgtatatttttataatctttcaaggtaatgtaagcacaattagcatggtgagtggcggccacctgctgtacggcaaggcagtggctgttcgtgttgccttgattgggagccatttagtttgccggatagaaaat

SEQ ID NO: 1574 - DNA, 430 bp, Mus musculus
actcaaactcagttttattaggacactaataaaagcagataaaaaaaaaagtccgcacagtgaaaggaggacacttatgctgtgacagatcaggcacattagtgaggagaattcttcagtgtataaaatgtaaacatttgccctggggtttcccacagagggcacagtccacgaggacttatttggaacaaaaagaatgtctattgaattcccagcataggctctgactgctgcaaacttcttgaattaaaatgttaaaattgctagcgcaccccacattttctatccggcaaactaaatggctcccaatcaaggcaacacgaacagccactgccttgccgtacagcaggtggccgccactcaccatgctaattgtgcttacattaccttgaaagattataaaaatatacagcgtataaaactcatgtgt

SEQ ID NO: 1575 - DNA, 366 bp, Mus musculus
caagcagagggagaattggtttattggcacagacattccttgttaaactacagggttaagtggtaactacaacaaaaagcaagtttttttttccagactagtttcattgtggttatctgtcggtcacacagcaaaccatgaccatgtagcttgctttaagccatacaattgggggtgatctataaaaccagtacagctcttcatacttggttgaggtacacaaagcataaaaatcctattgaaaaagcatcggctgaggacaggaccaaggagagctggccacattaccaatgtcgatggatgcagatgccttgggaaaaggtagctttctccagagaactgcactgggccattgacgaatgcctg

SEQ ID NO: 1576 - DNA, 535 bp, Mus musculus
gcaggcccaggctgtcgcgctgcgctcggtgagtgcaggatccagcatccaggatgtggtggtccttgatccttctttcttgcctgctggcactgaccagtgcccatgacaagccttccttccacccgctgtcggatgacctgattaactatatcaacaaacagaatacaacatggcaggctggacgcaacttctacaatgttgacataagctatctgaagaagctgtgtggcactgtcctgggtggacccaaactgccaggaagggttgcgttcggtgaggacatagatctacctgaaacctttgatgcacgggaacaatggtccaactgcccgaccattggacagattagagaccagggctcctgcggctcttgttgggcatttggggcagtggaagccatttctggccgaacctgcattcacaccaaggccgagtcacgtggaggtgtctgctgaagacctgcttacttgctgtggtatccagtgtggggacggctgtaatggtggctatccctctggagcatggagcttct

SEQ ID NO: 1577 - DNA, 641 bp, Mus musculus
attaaaggaacaggggcccaggcagggaataaataggaggccccggtttaaaaaaaactagaaaaacccgacaaaaacaaaaaattcccaaaaaaacggggaaccaaaaaggaggcacttaagggcaaacaaaacaaagagggaccccaaaccagaggcaaaaaaaagaaccccaggaaaaagaggaccaggcccccaaaaaaaagggaaataccaaacaccagaggaaaaagaaaaagaaaaacaaagaaaaaaaccacaggaacccaaaaaaaaaccaaacaaaaaaaaaaaaaaaaaaaaaaaaaacacagaaaaaaaaacaaaaaaacaccaaaaacaacaagggaaaaaaaaaacaaaaaaaaaagaaaaaaaaaaaaaaaaaaaaacacaaaaaaaaaaaaccaaaaaaaaaaaaaaaaaaaaaaaagcaaaaaaaaaccccgaaggaaaaaaaaacaggagaaaaaaaaaaaaaaaaacacaaaaaaaaaaccaaaaaaaaaaacaacaaaaaaacaaaaaaaaaaaaaaaaaaaaaaaaaaaaaaaaagaaaaaaaaaaaaaaaaaaaaaaaaaaagaaaaaaaacaaaaaaaccaaagagaaaaaaaacccaaaaaaaaaaaaaaaaaaaaa

SEQ ID NO: 1578 - DNA, 575 bp, Mus musculus
ggaaagatgctgtgcagcaagatggtttcaattccctgaacaccgcacataccactgagaaccacgggactggcaaccatagtgcccagtgaccagcggcttcccagggactctcacatcttgggccccaaatggacagatcacttcaaggagctggaggggttgaccaaggtgatgataaatgtcataatctctctgaagaaaccattgtgctttctgagatccgtgcccccttcctggatggaggcttgagggccctgggacttgtgccgtctataagattgggtaatcgctgccacagaggagagcagtgagcaaggggcttggggcaatttccagtggaggatatctacacctccatttatgcttgtggttcacacatttacgtttacaaatgagatttcctttgtttttcccctcagtagaattagacatttttcaaccatgactttaaatacaatctttagagataacgtggaactccccccatcaccctcaccccatgaaatgtctttaaaaggatggattagcatggtcttaaaatatatttctgaggttactagatgtattttgac

SEQ ID NO: 1579 - DNA, 453 bp, Mus musculus
gcttatagttttactgtacatttatttttaaagaaaaagataacaaaagccagaaaaatacaagttgtcccaacaaataatttcaaatctttgtcatgactgatattataaccttctacatagtttttttttaattaaagttatttctatatgccttgtattgtgtgatttgattaaatgcacaaacctttcgtaagctaaaataaaaacaagtattaataaacttttatcttacagggcaggaaaaagcccaagcaagctctctattccatgcctatttgtcagtgttcttattttattactacttatttatggattaagtctgtactgtatcatcttagcctacttcttccttcttagaaattatatatatatatatccatctatccattcttggagtcaaaatctatacttccagaatattcttaacttactctgattctgccagaggat

SEQ ID NO: 1580 - DNA, 596 bp, Mus musculus
ccggcaccatggcgtcgggctgcaagatcggcccgtccatcctcaacagcgacctggccaacctgggggccgagtgcctgcgcatgctggactcgggggccgactacctgcacctggatgcaatggacgggcattttgttcccaatatcacttttggtcaccctgtggttgaaagcctccgaaagcagctaggccaggaccctttctttgatatgcacatgatggtgtctaggccagaacagtgggtaaaaccaatggctgtggcaggtgccaatcaatatacctttcatcttgaggcaactgagaacccaggggctttgattaaagacatccgggagaatgggatgaaggttggccttgccatcaaaccaggaactacagttgaatatttggccccatgggctaatcaaatagatatggccttggtaatgaccgtagaacctgggtttggagggcagaaattcatggaagacatgatgcccaaggttcactggttgaggacccagtttccaactttggatatagaggtcgatggcggagtaggtcctgacactgttcagaagtgtgcggaggcaggagctaacatgattgtgtct

SEQ ID NO: 1581 - DNA, 487 bp, Mus musculus
cacagtatggaacttttattcatgtgatttctgtacatcaggaatacaagagtaaccctttacaaatggtgctgattttaccagaataaatgacgaaaccaaagcagtatctggtgacagtgacagggctttatggttcaaacccagccaagaagtttgttacaatctctttgagctttgcgtctgactgttctgagattttcccatcagacctgatattgcccaagagggactggtgctggctgataacgtgagacaagaaagcattctcaaactttgtgatcttgctgggctccagtttgtcaagataaccccgtacacccgcatagataacagccacctgttcttcaatagccatgggagagtactgtccttgctttagcaactcggtcagacgcacaccacgactcaagagctgttgagtggcagcgtccaaatcagaaccaaactgggcaaacgcagccacctcccggtactgagccaactc

SEQ ID NO: 1582 - DNA, 521 bp, Mus musculus
gctgcggctgcagacggtctctccgagaagctgcaaggatgctgtctgtgcgcgtcgccgcggccgtggcccgtgccctccctcgacgggcgggactggtctccaaaaatgctttggggtcatcctttgttggtgcaagaaatctccatgcctctaacactcgacttcagaagactggcacagctgagatgtcctccattctcgaggagaggattctgggagctgacacgtctgttgacctggaggagactgggcgtgtgttaagcattggtgatggtattgcgcgagtgcacgggctgaggaatgttcaagcagaggagatggtggaattctcttcaggcttaaagggtatgtccctgaacttggaacccgacaatgttggagttgtcgtgtttgggaatgacaagctaattaaagaaggagacgttgtgaagaggacaggcgccatcgtggatgtccccgttggcgaggagctgttgggccgtgtggttgacgccctcggtaatgctattgatggaaag

SEQ ID NO: 1583 - DNA, 431 bp, Mus musculus
gagtgtaaacccgtttatttcacagttgaggtggccctgagcccctccccactctccttccagagaagagcacatgcacagggttgacctttgggagctaggagggctcctagtgcggtggcggcagggtggagaggctggcaggtgcgaggggcaaagtcgaatggcgctggatgccattagcctggattccactaggatagggtggaaccccttttctctagtccctgacatcagggggtgggcagaaggggtgagcagcagtggccagggagcctgggaccactggcaccgtagtgttgatctctgatatgtggggtccttgatggagtcagttgtccttcatagtcagggaaaggggctgaggggaactctgggctttcagcctcgagtagtaaagtgcagatggaccaggagaggtgcctcgtggg

SEQ ID NO: 1584 - DNA, 583 bp, Mus musculus
cctggcgtccccaactcccatccggtgaccgcattcttctccgttgccgccctcagtttcccaacttccaaaatcaacccttcccccaattcattgcccgactttcaccctggactgtccactgtccccagctcctctctctgcgcttctgagtgctcctggttttctgcctcattgcccgatttcccccacgccacctgcttcctgcgtccgtccctttgtgcccaacccctgagcccccatttctaactccctgcttatcttctcttgtgcctccggtttccatttgctcccccgtgtgtttttcccagttctctagcctccaatcctgggttcacctccagctccctccgatgacctggaagctggcgactaggagcctgtgacccagagcagaggggcaggctgggtctctccgctgccccacagaggatgcagttcttcggacgcctcgtcaacaccctcagtagcgtcaccaacttgttctcgaacccattccgggtgaaggaggtgtccctgactgactacgtctcaagtgaacgtgtccgggaggaagggcagctgatcctgttacagaatgtct

SEQ ID NO: 1585 - DNA, 477 bp, Mus musculus
ggcattcaaaaatgcaaactttaataagcagcaggtcaaatgaggagtcctcaagaatgagcagagcagagctggtatcagaggcctcagaggcacctgcttcctccccccaaggccgggaggtagaaagcagtgagccctgctgaggaggagtggtgcccagctccatctaagtccacctgtctgaggccctaagctccataaagcgaagtggcagtctgtggagcccagcggccccctgccaggcctaggaggtcctccgaggagtgtggcaggctagccggccaaaatccaccattagattctgaagctttcctcccgaccatcaatgtggcggagcgtaggtagacatccgtgccaatgccctgcagggactgcagctgcagggagccaccaagatactctgcatatgccctggacgtgggcaacccgaagccaaagccatgcataggtcctgactggccaccactgtgcata

SEQ ID NO: 1586 - DNA, 595 bp, Mus musculus
gtagcaggacaatgatactgacttcagtgctgggcagcggccctcggagctggtcttcactttggcccctcttggggtcctcactgtcactccgggctcgctcaacatcagccaccgatacacaccatgtagagctggccagggaacgctccaagactgtcacctctttttacaaccagtcagccattgatgtggcagcagagaagccctcagttcgcctcactcccaccatgatgctctattccggtcgctcacaggatggcagccaccttctgaaaagtggccgctacttgcagcaagagttaccagtgaggattgctcaccgcatcaagggcttccgtagccttcctttcatcattggttgcaaccctaccatactgcatgtgcacgagctatacatccgggccttccagaagctgacagacttccctccgatcaaggaccaggcagatgaggcccagtactgccagctggtgagacagctgctagatgaccacaaggatgtggtgaccctgttagctgagggtcttcgtgagagccggaaacacatccaggatgaaaagctagtccggtacttcttggataaaacactgac

SEQ ID NO: 1587 - DNA, 427 bp, Mus musculus
  misc_feature (1)..(427): n is a, c, g, or t
ggcccgccccctntgtgtgtntctcttatggtgtgtgtcgacgccacatctcattgttctcgaggtcacacgtcaagtcatccatttatctcccaccacccggggaggcacgggtgaggtgggtgcagggactaactccccttaggaatccaacgtacgcgagctcattattcatctctggaggccactggggcctcaggaacatggcttggccaaccctgcgccagaagtggggcttacaccccctcagggttcctgcttcccagacgatggccaggaagcccagggtcggcaggccttggtctgcagacttcaggatcagtacactggttgcacgccttgaggttcaggctacagctcgtcatggtccccatcactgggtgcttctggtggcggctctcggcacgctgctggtgtcatcagctcc

SEQ ID NO: 1588 - DNA, 487 bp, Mus musculus
cccccacagcctcccagccccacagaggatgagaagatgccgccctatgatgaggagacccaggccatcatcgatgctgcacaggaggcccggagtaagtttgaggaagtcgaacggtccttgaaagagatggaagtattccatcaggagtttggaacaagaggtctcctttgatttcggtccctctggagagtttgcatatctctacagccaatgctacgagcccaccaccaatgagtacgtctaccggctttaccccttcaaactggtctcccagaaacccaaacatgggggctccccgaccagcctgggcacatggggctcctgggctggccctgatcatgacaagttcagtgcgatgaagtacgagcagggcacgggctgttggcagggccccaaccgatccaccacagtgcgcctgctgtgtggcaaagagactgtggtgaccagcaccacggagcccagtcgctgtgagtacctcatggag

SEQ ID NO: 1589 - DNA, 724 bp, Mus musculus
  misc_feature (1)..(724): n is a, c, g, or t
ccgagttttgatggttttattcactgatcataggagggtctcatgaacatcaaggtgaccgtgactgaggtcctagcacctggaacgagaccatcgcggagcagtcagtgttggccatccctggccagagggcttggggtgtctcccccttgtcaagtcttcggcttcgtggggcccctccttctggtgtagcagttttattcctggctcattctcaacaattaaaaattcctaaaagactgtttgcaagaaaatatcaaagtaggtaagaagagtttcagctcttcttagtgtctaaaagtaaaaagaggagtcggggaggaggaggaggtgaggagagagaagtcaggggtctgccttgtgtcctccttcccccagagcatcctacgaaaaaccaacgccaggcgacatcaatgctgcctggagacaggctctgtctctctgatgagccactcgagagcttcctggcggccctggctctgcagctccttcccaaccacgtccctgcaggtctggtggtagctgttgagccagtcacactctttatctgtaagagcattcacatctatcattttggtctggatgggaccaaagttagaggttcaaaggtcaggcttcctcggttgttgaaattatacttggtttttgctgggaccaccagacaacattctcaatgcggatccaannacgcccgtcttcgtaataccctgnctcatcagtgacg

SEQ ID NO: 1590 - DNA, 438 bp, Mus musculus
  misc_feature (1)..(438): n is a, c, g, or t
gacgtgaagcagcacctgctgcttgacttgggcctggaggcggaatacagaatccaggtcctgccatacaagtccatcctgagtgagctcaaggccctgtgtgctgacctgtccccgagggagaaagtgtgggtcttttgtcaaggccagctacgctgtgagcgaggccatccccaaggatcaccgctgctgtatgccttacacacccatctgcattgccaaagccgtgaanaactccgctgagtcggacggcatgaggcgggctcacattaaagatgccgttgccctctgcgaactcttcaactggctggagcaggaggttcccaaaggtggcgttacggagatctctgcggctgacaaggccgaggaatttcgaaggcagcaggctgactttgtggatctgagcttcccaacgatttccagcacgggacccaacgg

SEQ ID NO: 1591 - DNA, 536 bp, Mus musculus
ccatcttcccatgaatatttattaagcagctaccacatgccaggctagttttcactctaggcagagacaagaaagacataagtctgctctcatgaagctcacattctcatgagggtagaaaatatcaaggttacaatcaaaagtggccagctagggacataaagcaggtgggcagagacaatgcctgtgaacctgaggagccacaaagcctctcgagatcactggaacgacagggaggagccagccacctttgggaaagcatccaggtggattctaatccagctcccatggaccctgggccatcatctaagagtgtctcaaagtaaacacatccaaaaagactgaaggggcccccctttattgtggaggtttccagagcaggacaggagagaggagctggcctcagggaaggatctagctggccccttccctccccagcctggtaccccaggtccaatgacatcagtctgactcctttgccctcacatgtccccaaagtctcactccagaccccaggactgaggcagcaggatgtg

SEQ ID NO: 1592 - DNA, 369 bp, Mus musculus
  misc_feature (1)..(369): n is a, c, g, or t
ccgctctctccttcttccgatgttcttaacgtcccggacagaagagtaggctccagaagccaggcgcagcggagctgcggagcccgctgctggagacgtcagctcctgcccatcggaaggccaggtgtgcgtgagttgtgcccaggggtgtcccgcaccccggcgccctgcgggctctaacagctgggattgcccgggggaactgggcccagggctcaggtggagcgnntnntgcccggngctnnnaggtgagaccacgctggtaaggctggtaccaagaccttgcccctccagacctgggccgagacgacaaggggagccgncaagatgcccgaggaaaatatcttcctgttcgtgcctaaccttatc

SEQ ID NO: 1593 - DNA, 293 bp, Mus musculus
cacgcaccgtttatgttctcttttacgcatgttctctctaggatttttaactttaaatgctccagtgattaatactgcatgaagagaggaagaaaagacagcatttgatggcaaacactaagggtagatgttgggggaactcacggatggacggacgggggatcagatcccagcacgtacttctcaccgcagccagcgaccaacggtgacattggccaagagcactttggcacgccaacatctgcaagccttgcacagatatgctcccatccagcgggtagcagccttgacac

SEQ ID NO: 1594 - DNA, 403 bp, Mus musculus
aagggaggaaaaaaagccagaaaaagtttctttgcgggagtcccaaacggggcgtgggacagtaagggagggaaagggcccaaggctccgagctccaggctctgagcttgtggggaccctgacctctgtctgtagggtagtaaccctattccagaccatgtccgggcccacctggcttcccccgaagcagccagaaccctccagactccctcaggggagatcgctgcccagaggcgccctgggcccgccaacggcccacggagcaacactccagcctcaccccagggtcaacttttgccccctcccgcctgaacactgttatcagcctccgggggtaccggaagatcgggggcctacttgggtgggatcccatggaacaccccagcgcctgcaggggctccct

SEQ ID NO: 1595 - DNA, 505 bp, Mus musculus
  misc_feature (1)..(505): n is a, c, g, or t
gcccgttctnnttttattgtgtttgtgcaaagttacaaatttattggtctggaaataaatacaaacatcttattaagaaactgccctggagagacatatacagtgatttcttgtcagcattcaatcaccctggcctggattcctgatctttctacacaaggtcagtggaactcctcctccacggtaggagttggcaggtaaactgatcccttgtctctcatgccgcctatagggcataactacttttcctctagcaactccaagatcctggaagtcgccaggccttgagggctgactcccaacgatcaagtgtctctgatctgatcacatttcctataggaaaggttcaaggttagccacagtaagaatcaaaaggcagtagtatggagcatgggcattaggctggcattgcttaagaggccaatgctacaaacccagtcagcaggaggggcaggagagggaagcaagttcccgtggaatgtacagnaaccaaaccagtccttcc

SEQ ID NO: 1596 - DNA, 476 bp, Mus musculus
ctcacccatcttcgtctccctcttcacctcccgcggggcgctgcacctccaaccttgtggttggctcctttccgtgcttgcttgctcattaggtgtgtgatagcacggaaatgtcccgagagctacatgacgtggacctcgctgaggtgaagcctctggtggaaaaaggggagagcatcactggtctcctgcaagagttcgatgttcaggagcaggatattgagaccctacatggctccctgcatgtcaccctgtgtgggacccccaagggcaaccgtcctgtcatcctcacgtatcacgacatcggcatgaaccacaagacctgctacaaccccctcttcaactctgaggacatgcaggagatcacacaacattttgctgtctgccatgtggatgcccctggccaacaggatggtgccccttccttcccagtggggtacatgtacccctcaatggatcagttggctgaaatgctt

SEQ ID NO: 1597 - DNA, 1463 bp, Mus musculus
  misc_feature (1)..(1463): n is a, c, g, or t
cccccttaaatagttgtttattggcagtgggctggaagggatggcagatttagcattcacagacaacaccgcacacgagggcagcagcaagagtgatgggaaagagcctgaagacccctcttcaatagcaagtgggtaggcaggggcctggagtgttgatggagcagccttagttcagctctggttagtaggcatggttagagatgaagagagattcactggctgcggctccagactggccacttggggtatactttccttgacaagcgaggctgttggccagggcgcgcttgatgtactcctcctgggctgccttcaggttctccttcttcccaccccaggcctttagagcagaggcctgcagggctcgaccataggagaaagtcaaggcccatggcttcagcagggggcacttgttgatagcattgaggttgatggatgcctcttcctcactctgccctccagacaggaaagtgaccccagtgacagcagggggcactgtgcgacgaatgctgtgaccgttgccatggcaatctcctcattggaaaatttctgggtgcaagcatggccaggggtgaccatgttgggcttcagcaatgtgccttccagatagacatggtggtcgctcagagcttgtagacagcgccagnacttctcagtacatactggcagcgctcaaagtcatgtcccatcagggagattgncagctcacatggntacaatgcatctgctgnagatgctgcatacggnccagaacatngncatttcatgatgnncaggccgangagtatgtccccatcttagcacaagcgcactgncaaagtcgctcatctctatactggcaacgtcaacagcatcagcctngtagttccgcatggtctccaggacaacctattactaatcacaacacttgatttactgtggaggggcaatctctctgagcccngaaagtacccccattggtcacagtctagaaaattggaaaaccttccggttcggaaaaaaagctttaatccgggataataaaacccccaaaaaaggtgtaaaacctctccggaagtgtagggggggggttttccaaagtggtctcccgggaaaaaaaaaaccgtatcggtggcaacacgcgtcccagaatgtagaaaagtgttattacacaacagggaaaaagggaaaaaatttccccgcgaagataaaaaagggtttggtttaaaacacccagaaggcacaaataagaattctaaaccccgccgaaaagtttaacctctttaaaaaaaagtcgcaaaaaaaatggcggaacacaaaacatctgggggngggttgngggggtgggtgggtgtgtgggtggggggggggttgggggtggtgggtgtgtcgggtgggtgcggtgggtggggtcgtgtggggggttggtgggttggtgtcgggtggtggttgggtgggtggggggggtttttttttttttt

SEQ ID NO: 1598 - DNA, 395 bp, Mus musculus
  misc_feature (1)..(395): n is a, c, g, or t
ccgcgttcgctccttagtcctttcgcctacccaccggcgtaccaggcagacccaccccgtcctgtgccaggaaagcactgccaccggcaccatgccccacccatacccagcactgaccccggagcagaagaaggtgttgtttgacatcgctcaccgcattgtggctccgggcaagggcatcctggctgcagatgagtccaccggaagcattgccaagcgcctgcagtncnttnncaccgagaacaccgaggagaacaggcgcttctaccgccagctgctgctgactgcagacgaccgtgtgaatccctgcattgggggggtgatcctcttccacgagagactgtcccagaaggcagatgatggacgtcccttcccccaagttatcaagtccaagg

SEQ ID NO: 1599 - DNA, 655 bp, Mus musculus
  misc_feature (1)..(655): n is a, c, g, or t
gcacgcacctgtgtntgttcttntgttttttttaggcagtagaaactgtattttatccaccttcctttgttaacattctaaatagcatataaacattataaaacaaattaatctgtttgtgacctgggcttgtgacaggaaccatcaactatacagaagtgacaggccttttcctctttgtttttccagcccctttcagtctgtcacttgtcctttcttggttaatctatcctaacccttgtgaaatagggaccaaaaaaagtaccaactcagtatcatgaggtttaagagactgcccaacagtaaaaaggcccagctctcgggggccttcaaactccaggggttcctgctctttggtggagctcgttcttgggtcctggactgagaaaccaatggatctgcaaaccaggcacacagatctaaagaccaagtgagggtctcattgataaggtgcatggcttgtgaccatcactagcaacatccagcctcaggacttccaagacttctgagatcatgtcccctgtggatgcctaccaggtacctctccattccccctccacacctggaacagtatgagggatacagcagaggtcaaagacagagtgaccagccccagagggtgtaaggggagggctgtgtgggagaagcactgtcc

SEQ ID NO: 1600 - DNA, 474 bp, Mus musculus
ctgagttcatcagtcctagcggaagcgccgccagcatgtctgataaactgccctacaaagtcgcggacatcggactggccgcctggggacggaaggctctggatatagctgagaatgagatgccaggattgatgcttttgtcgggagatgtactcagcctccaagccactgaagggtgctcgcattgctggctgcctgcacatgaccgtggagactgctgttctcattgagactctcgtggccctgggtgctgaggtgcggtggtccagctgcaacatcttctctactcaggaccatgcagcggctgccattgccaaggctggcattccagtgtttgcctggaagggcgagacagatgaggagtacctgtggtgcattgagcagacgctgcacttcaaggacggacccctcaacatgattctggatgatggtggtgaccttactaacctcatccacaccaaatacccacagctt

SEQ ID NO: 1601 - DNA, 498 bp, Mus musculus
gcacctgtgattattatttttgtgcagcgaactttattgatggtattcaagagagtagggagggctccctaggcccctcctgttattatgggggtctgggatggaaattgtgagggagatgctcagtgttgggggccgagttgggatagggcctctcttgctcagtgtccttgctggggtgggtggtccagggtttcttactccttggaggccatgtaggccatgaggtccaccaccctgttgctgtagccgtattcattgtcataccaggaaatgagcttgacaaagttgtcattgagagcaatgccagccccggcatcgaaggtggaagagtgggagttgctgttgaagtcgcaggagacaacctggtcctcagtgtagcccaagatgcccttcagtgggccctcagatgcctgcttcaccaccttcttgatgtcatcatacttggcaggtttctccaggcggcacgtcagatccacgacggacacattgggggta

SEQ ID NO: 1602 - DNA, 470 bp, Mus musculus
tgttccagagacggccgcatcttcttgtgcagtgccagcctcgtcccgtagacaaaatggtgaaggtcggtgtgaacggatttggccgtattgggcgcctggtcaccagggctgccatttgcagtggcaaagtgttttttgttgccatcaacgaccccttcattgacctcaactacatggtctacatgttccagtatgactccactcacggcaaattcaacggcacagtcaaggccgagaatgggaagcttgtcatcaacgggaagcccatcaccatcttccaggagcgagaccccactaacatcaaatggggtgaggccggtgctgagtatgtcgtggagtctactggtgtcttcaccaccatggagaaggccggggcccacttgaagggtggagccaaaagggtcatcatctccgccccttctgccgatgcccccatgtttgtgatgggtgtgaaccacgagaaatat

SEQ ID NO: 1603 - DNA, 572 bp, Mus musculus
gcacgacccgtgtgtgtgtgttgtgtttattttttttttttttttttttttttttggtccaaattaaattttattttttagcttcaccaggatgtggtaacagcattggcacacacagatactgacattaggctcaattaagtgagatgccggtgggacaggaagtaggaagatgaaggtaataaagacagacatggaagctagagttaagtttggatattctgccactttctacaatagcagaggtgactttccctctaacgcggttttcttatctgtcagtggatttgagatgcctcactttacctctgtaacattctgaggcttgtcactcaatgtcccccgtgtcacagtgaaggctgagaagagaaggccacagtggttcagatgctctgaagacctggtcttggtacaacagagctcactggtatttgcccagactggcagttgaaggtcaaagccagtgagtgggttagacagactggtagtgccacctccttaccccgggtggcagggaacgggcacggggaggggtctgcacctattctgaagaaggagccataaaggcagca

SEQ ID NO: 1604 - DNA, 477 bp, Mus musculus
cggcccggagcgcgcacctctcagactccagcttcccccgccaagcttgctatggctcccgacccggtgccgacccctggcccggcctccgcccagctccgccaaacgcgctactttacttgggaggaggtggcgcagtgctccgggcgggagaaggagcgatggctcgtgatcgaccggaaggtgtacaacatcagcgacttcagccgccgccacccggggggctcccgggtcatcagccactacgcgggtcaggatgccacggatccttttgtggcattccacatcaacaagggtcttgtgagaaagtatatgaactctcttctgattggagagctggctccggagcaacccagctttgaacccaccaagaataaagcgctaactgatgaattccgggagctgcgggccacagtagagcgaatgggcctcatgaaggccaaccacctcttcttcctggtctacctgcttcacatc

SEQ ID NO: 1605 - DNA, 621 bp, Mus musculus
ctcaatagggctttattgggggtaactggctgcacacagctgagcagcaggagtggtatgtctgtggcagggaccccgggtgcccggccccgccctcctgcctgcctgtgcagacttcctgcctagaagcgcaccagaacatgccactgcggatccggttgtagtctgggagctgctcgatggggccatagccagccactgctggacattggtcataaaagtacttggagcaaatgtcacgcagcatctgggcatccacctcctgaatccggctctcccactcagccagagggacgcggcggccataagtcaggagactgcgaccaatgtcttcacacacaggggtggtgccatccaaatgagacaccaaagcattcctaaggatgtttttgccccgagtcacctcactctctgtagcactggtacataggcgcatccactggccttgcaggaagaagaccatgtcatcgatactcatggcatcacagacaaagtgtgcgcccagcagcccagtatcagagtaggagatgttgaaggtctggaaactctggcaaagcttgttagccacagcaacggaagccagcgggcttgacaggtgcactccaccaccgtaagtgcagt

SEQ ID NO: 1606 - DNA, 383 bp, Mus musculus
  misc_feature (1)..(383): n is a, c, g, or t
cggcgtccgcagtctgccgagcggcctgctccgggacgcaagtgctacttcgcacccgccgctcgccggccctgctgaggttacctgccttgcggggtaccgcaaccttcgcccaggccctccagagcgtgccgtatcccaggtcagcatcttggacaacgggctgcgtgtggcctcggagcagtcctcgcatgctacctgcacggtgggagtgtggattgacgctggnnnnnnnttatgatactgnaaagaacaatggagcaggctactttttggaacatctggctttcaagggaacaaagaatcggcctggcaatgccttagagaaggaggtagagagtattggggctcatnttaatgcctacagcactcgagagcacact

SEQ ID NO: 1607 - DNA, 766 bp, Mus musculus
  misc_feature (1)..(766): n is a, c, g, or t
gaggtttagcatcagtctttaatgctgtcacactgcataatgacaagtcacacactttggtcttgtgttggtagtggcaacttacaatgagttgaatggtcagaacaccaggctagctccaaagaacagatactttcacgcccaggtctgatcccatcacagccctggacagtagttgacagggactgctttcgtctgagtgcacaccagcttccaatggaattataaaaacatatttacatacgttccacagtgctcctttcatcagaagcaaagacccttttatcaaaagggattagatctaggactgtgcaaaatccaaaaggattgtatccttctagagttcagagtccattacacacacacacacacacacacacacacacacacacacacacacacacaaaatcacctgtgcctctgagaagtgccaggtgtggccaaggtctacctctggaccagcaagtactgtgactgtaagccagccatctgatgtcaatggagccagaggtccaggggatctcctggctggccaggccccagaacctggaaggaggctggccctgtggtcctgcaaccaggtattgcttgtgatgctggcctggcagtcctagggaattggtctcaatttgagatggccaagacaagacaggactcttctggnnggagagacaaggcatgggacaatacagataaacaagacctccacacagtgagactactatgcacaggtctggcactgagatggcgacactgtcacatgaca

SEQ ID NO: 1608 - DNA, 502 bp, Mus musculus
  misc_feature (1)..(502): n is a, c, g, or t
agaagttcaaggagatcgccgaggcctacgacgtgctcagcgacccgcgcaagcgcgagattttcgaccgctatggagaggaaggcctgaagggtggtagccccagtggaggaagcagtggtggtgctaatggttcctcnttcagctacacattccacggagacccccatgccatgtttgctgagttcttcggtggcagaaacccctttgataccttttttgggcagcgcaacggggaagaaggcatggacattgatgacacattctctagctttccaatgggtatgggtggcttcaccaacatgaactttggacgttcccgcccttctcaagagcccacccggaagaagcaagatcctccagtcacccatgaccttcgggtctcccttgaagagatctacagcggctgtaccaagaagatgaaaatctcccacaagcggctgaaccctgatggaaagagcattcgaaatgaagataagatcctgaccatcgaagtgaagag

SEQ ID NO: 1609 - DNA, 593 bp, Mus musculus
  misc_feature (1)..(593): n is a, c, g, or t
ctctgngagtcctactgagcangcggcgcaccgcaccgtgtgtgttgttgttttttcagtgggggcagtgggtggggtttattgcacttgcaacagagtttaaataagttggggtgggttctggaggagaggggagggttggctagggagagaggggcagcgtcagtgcagctggtgggcagaacccaggtcatacaggcctggggcttcccgttctctctggggaatgagtggccaggctgaggttccaggtctgtttgccaatgtggcctggttagggtcctgggcaattcctgacttgtcctaagtcagggataaataggtttctaagcccaggtctgcagctgacccaaatgccaccttgggtctgctagcataggttcttagaatccgagactgggctccagatcaaccctaggccccagactgggtctggctccattctctttctgacttccatggatctgggtctgggccagcatcgacctttgtttgggatttgtcctgagctggtcctgcagcaccatccacggttagtgttcttcattggccttccaggatgggggctgttggagttgcaggtctcactccca

SEQ ID NO: 1610 - DNA, 474 bp, Mus musculus
gccgccctttttttttttttttttttgggtctatagtaattttattgtaacagagaaaccaggcggcagtacgtctacatgattagagcagatggtggttatctttcccaagggcggagtctgagccgggctggcattacacaaaccccagagtatctccttctgatcctaccctgcacgtctgactcatgtgaagagacaggctgtgcagccaggatggatgaagaggtccagctgggcagaggccccatcccagtaggagccaatcaatcaatgactgaagaggactctgaaatcaagggcagggtctctctctctccacggctctttgatgagagaggaggctatgcaggagcagaaaacctatgctctccattcttatgtaactccccccataggctgaggcggatgtttgcagtagaacgggatgagactctaggctctagaacagcaatgacaaggggcaggcggaca

SEQ ID NO: 1611 - DNA, 595 bp, Mus musculus
ataatagtctgttttaatataaacaagtgttggaatcaatcaatgtccatctcaggaagcttcttgtcgccatcagaaggcacagctgtgtctgcaccgtgctcagcagcctgggagcctgggttgtctccttggccatccactggtccattctgctcagcatgttttggttcctcctttgggggttccactttgggtttgggttttgaaattataggactgcaaatacttgtcagctccttaattttagcttcaatctcctttgtcttgacaactggatccaccgtcaggctctgtttgttctgcaggttaagcttgctattcatccactccatcgcctcattggtgcttttctctacctttgtcacgtcagcagcatccaagtgttcatactggtcctccttgtttttgaaagagctgatcactttcatatactgttggatttgcttccctagttcttcaaataattttggtctttcttcagattcctggaaccgtgtcttaatgggttgacctaaactttttaattcagccaatttgtctacataaacttgctttggttgatcttccccatcttcatacagccagttttcag

SEQ ID NO: 1612 - DNA, 384 bp, Mus musculus
  misc_feature (1)..(384): n is a, c, g, or t
ttggtcctaagaatcgttcaattggagcagcagctaagagccaggtaatttctaatgccaagaacacagttcaaggctttaaaagattccatgggcgtgcattctccgatccatttgtggaagcagaaaaatctanctttgtttatgatgttgtgcagttgcccactggattaacgggcataaaggttacatatatggaagaagagaggaattttaccacggaacaagtgactgccntgcttttgtcgaaactgaaggagacagcagagagtgttcttaagaagcctgtggtagactgtgttgtctcggttcctagtttctacactgatgcagaacggcggccagtgatggacgccacacagattgctggtctcaattgtttgc

SEQ ID NO: 1613 - DNA, 659 bp, Mus musculus
acctttaaaccgatttttatttgttacgtgggaggtgggggaggttgggggggtgcccacggataccagaagaggatatcggatcctctggattctaggtggttgtgaaccacttagtctgacgctctggcatactggaagagcaggaagtgctcttaacagctgagctcttctttctagctcccaacccttactttttttccttgcgttttgatctgcccttgttagcctaggaggaacaaagatccatctgggtaaggctgtgtgcacctgtgatcctagtacttgggaggaggccagttctcaagttcaagagtagcttgggctacatggtgaggctcagtctcttaggtcacacattagctttatcagttccagtctctgctctcaagccaccttcttccatacataggcctgtctctgaaaaatttccctgtgtcacaggaatagtggagaagagggggatgagtggacaggagggaggaactctgggtcaccagagttcatggacatctccactccttggctcagccatggccctattagctgccccaagcacctggttcccagctcttttttgaggttacaattattgtccagttctcttacttgtttgatatacaagggacaccagctagcacatataaaaacatgaggag

SEQ ID NO: 1614 - DNA, 566 bp, Mus musculus
  misc_feature (1)..(566): n is a, c, g, or t
tttgttcctttcggaatggtgcgcagggctgagccccccgacgggggctggggatggatggtggtgctctcagcgttcttccagtcggcgctcgtgtttggggtactccgttccttcggtgtcttcttcgtggaatttgtggcggcgtttgaggagcaggcagccagagtctcctggatcgcttccatagggatcgcggtgcagcagtttgggagcccaataggcagtgccctgagcacgaagctggggcccaggcctgtggtgatgactgggggcatcttggctgcgctggggatgctgcttgcttcatttgctacctccttgacccacctatacctgagtattgggctgctgtcaggctctggctgggccctgaccttcactccgaccatggcctgcctttcccgttacttctctcagcgtcgatctctggccatggggctggccctgactggagtgggcatctcctntnnngcatttgcccccctcttccagtggctgatcaacaactatgcctgnanaggggccctcttgctagtgtctgccctctcactacacctgatggc

SEQ ID NO: 1615 - DNA, 617 bp, Mus musculus
  misc_feature (1)..(617): n is a, c, g, or t
cacttgttgttcttttaaaagaagaaaaataatttattcccaaagatgtagaagtaagaaattcatcctgaaaatagggcttggtgtacatctgctggggtagggctcctcttgagcaggcactcctgactgtcccgccgagtcttgtttgtctcgcagcaattcttaaacacatcgctgactctcatgttgtgagctggcaagagccatattcaaagccacaggcttcaagataagagtaacacatttcccgaaacagtggagtgcagacacatctcagaggcagctacgcaggcacataattcagagtgtaaaaaaggtgaagggaaaaaatactgtatgcagaggaagatcttcaagtgtaaggcaggtaacgcccgaagtgggctatggaggaaggtctgatgtgcaggtgattctgcacagaaggcttctgtctgcgacctcagtgcctaggcactgtgcagcgcgtcttcatcctcaaggccagtggtacttcagataccagatggtttcatttttcaactgtggtccaaacagaggattgagctgtgccagaattgcaatcagccanaagagatagcagcaaactgaacaagtcaccaacatggtgatga

SEQ ID NO: 1616 - DNA, 457 bp, Mus musculus
ggaccgattcggctgctggggcgcaggcatggcataccacggccttactgtgcctttgatcgtgatgagcgtgttctggggcttcgtgggcctcctcgtgccctggtttatccccaagggtcctaaccggggattttcatcaccatgttggtgacttgttcagtttgctgctatctcttttggctgattgcaattctggcacagctcaatcctctgtttggaccacagttgaaaaatgaaaccatctggtatctgaagtaccactggccttgaggatgaagacgcgctgcacagtgcctaggcactgaggtcgcagacagaagccttctgtgcagaatcacctgcacatcagaccttcctccatagcccacttcgggcgttacctgccttacacttgaagatcttcctctgcatacagtattttttcccttcaccttttttacactctgaattatgt

SEQ ID NO: 1617 - DNA, 596 bp, Mus musculus
cacgttcttttgtattgttttttcgtcttctaaaactgtcctcatcatcttttctctttttaaaaatgctatcctcaacttcaccaactgctaacatgatcatctgtactctttgcagattgacataaccactttctgtaaggtaacccccagttttgtgtaccacgtttttgtatatgttaaccaaacgatcaattgcaccttccctaatctctagtgatggcaagtgaggaaggaaatcattccccacaaagaagcacatgaacacccagtcatcaatgctcctctccacatcaaatgggaatggtaagctggccatggtgagttctctttccagatactctcgaaggacattcagccgaaggaagacaaactccccttctgcacaaggaagactatctgcaagttcatcatgctttcccttcttttctcttggcaaaccttcacaatccttgacctcgtgtccaaactgattacaaagagcacatggtttaggtttatttggtttgaattcttctctgattatggtgaagttaggttcatgtgtagcaagaccaagcataattagatcagcatcagctccacacaaacaatga

SEQ ID NO: 1618 - DNA, 608 bp, Mus musculus
  misc_feature (1)..(608): n is a, c, g, or t
gagctgcccgctggtcatgggagtcccggcgttcttccgctggctcagccgcaagtacccgtccatcattgtcaactgcgtggaggagaagccaaaagaatgcaacggtgtaaagattccagttgatgccagttacctaatccaaatgatgtggagtttgataatctgtatttggatatgaatgggatcatccacccctgcactcatcctgaagacaaaccagcaccaaaaaatgaagatgaaatgatggttgcaatttttgagtacattgacagacttttcaatattgtaagaccaagaagacttctctacatggcgatagatggggtggcaccacgtgcaaaaatgaatcagcagcgttcaaggaggttcagagcatcaaaggaaggaatggaagcagcagttgagaagcagcgagtcagagaggaaatacttgcaaaaggtggctttcttcctccagaagaaataaaagaaagatttgacagcaactgtattaccccaggaactgagttcatggacaatcttgctaaatgccttcgctattacatagctgatcgnttaaataatgaccctgggtggaaaaatttgacagttatattatctgatgc

SEQ ID NO: 1619 - DNA, 544 bp, Mus musculus
ctgttttcaccctttatttggaaaacagggcaacatttaagttttagattttttaaatgaattaacatggtaataaaaagtatggcctgaatttggagagtaagtggttttccagtttggggtgcaagatcatctccaaaggagaagagaacacatactcagtgagccaccaaggggttggcttccactcactgagggcaagcagtgcagtccaggctaaccatccatgatctttgtcacagcaaatcagagtctccaattgttcaaagtaactgtaggtacaagacagaaagcaactccagactggcttattaattgatctggatgactatgaagtgtcccccattcctgaggtgccaaaaatcttcagagtgactgttggagcagggaacctttcatgtgctcccagttgttatacagtgcatagagactggtgagtgtcagtcctgccaggccaccgcgtgctattcctcgaagaccacctgtacatttatacaacatcccggtcatggttccagctgctactgtgttgaggtcatcttct

SEQ ID NO: 1620 - DNA, 559 bp, Mus musculus
tggtgaaggtggcaggagcaacgcgggtcttcccgctgttgcttgtcgcggccacggccgagcatacgtccccggcctgaggtggtggtggcgagcccaccgccgtttgctgcgacctcatggaaggtggcggaggaagtagcaacaaatccaccagcgggttagctggcttcttcggagccggaggagcgggttactcgaacgctgatttggccggcgtcccgctgactggtatgaaccccctgtctccttatttaaatgtggatccacgctatctcgttcaggatactgatgaatttattttgccaactggagctaataaaacccgaggcagatttgaactagctttctttaccattggaggatgttgcatgacaggggccgcattcggggcaatgaacggtcttcgtttaggattgaaggaaacccagagcatggcctggtccaaaccaagaaatgtacagattttgaatatggtgactaggcaaggagcactttgggctaatactctaggctccctggctttgctctgtagtgcttttggtgttatcattgagaa

SEQ ID NO: 1621 - DNA, 440 bp, Mus musculus
ctaaaacaccaggctcaagtcgtggcacttatggtataaaaaagttcctacaccacatgtgcatgacccaattgttaaatagaccatatccaaggtgaacacacaccctgacccacctttttctcaatttttaaaatagccaattcctcctctcccaaggtactaggccagcaacactcaggggcctttaatacgggtgtcgccacttgggctatagcatttatcaactccacactgaggtgaagattccaattacattcgagacttaagttctctcaattttcacccaacgaaagttcctgagtccagtatttacaatattacagctctagcagatcagtgcacctacaactcatcttttcctgatgtatcctcttcaccagttgggggagggcctccacttccatagagtttgctgataattggctgaacaatttctt

SEQ ID NO: 1622 - DNA, 583 bp, Mus musculus
ccaaaaccgcctgacacctgaagaaattgaaaggatggttaatgatgctgagaagtttgctgaggaagacaaaaagctcaaagagcgcattgacaccaggaatgaattggaaagctatgcttattctctcaagaaccagattggagataaagaaaagctgggaggtaaactttcttctgaagataaagaaaccatggaaaaagctgtagaggaaaagattgaatggctggaaagccaccaggatgcggacattgaagactttaaagccaaaaagaaggaactagaagaaattgttcagccaattatcagcaaactctatggaagtggaggccctcccccaactggtgaagaggatacatcagaaaaagatgagttgtaggtgcactgatctgctagagctgtaatattgtaaatactggactcaggaactttcgttgggagaaaattgagagaacttaagtctcgaatgtaattggaatcttcacctcagagtggagttgaaaatgctatagcccaagtggctgtttactgcttttcattagcagttgctcacatgtcttggggtcagggagaggaggaattg

SEQ ID NO: 1623 - DNA, 554 bp, Mus musculus
gttttctgcatgtgtgctgacaatttattgaggcttatgtgattggagcttgcacgaatggacatacaacatcaaggcttttttttgtaatataaaacaattcgaaataaatatgtattaaaaaaaacctatgtcaaacaccaatgaataattgacatttacaaattttaagaaaatcatttaggttagtaattttcatttcccccacaaaataaacagctttcttaaagcaggaggaaaagagtcagatggaaacaaagtcatgcccatggcacagtcatgatgttattctcagaggaactctttaccaagattaagacaaaagcatctgaggagaattatggtactgaatcgtctagaacctgggagagaatttagcaaaagaaaacaagtggcaaagttgagaaaagctttcaatggaaagtccacccccttgagaaaaatgaatgaacacccacaaactaacattttcagggtttcaatattttcatatcagtctaacctctacccccaaatacaaccaaacaccataaaaacaccaaaaaaccccataa

SEQ ID NO: 1624 - DNA, 574 bp, Mus musculus
cacactctgaggcgcctgagtgaaaagtgtggcaccatggcctctgtgctgtcctacgaaagtctggtacacgccgtggccggagccgtgggaagtgtgactgccatgacagtgttcttccccttggatactgctagacttcggcttcaggtcgatgagaaaagaaagtcaaaaacgacgcatgcagtgctcctggagataattaaggaagaaggcctcctggcaccataccgaggatggtttccagttatttccagtctctgctgctccaattttgtctatttttacacttttaatagcctcaaagcagtgtgggtcaaaggtcagcgttcttctacaggaaaagatctcgtggttgggtttgtagcaggagtggtgaatgtgctgctgacgactccgctctgggtggtaaacaccagactgaagctgcagggggcaaaatttcggaatgaagacattataccaactaactacaaaggcattatcgatgcattccaccagattattcgagatgaagggatcttggctctgtggaatggcaccttcccctccttgctgttggtcttcaaccctg

SEQ ID NO: 1625 - DNA, 278 bp, Mus musculus
aactgttttgaggatttaatggcagggttgggataggaaaattctagctgctgtgcttgccttcctttggtaaggaggctgcccataggtgggatgaggttgaccatggagtatggaattggtcaggggacatctagagcccccaaaatattgctaggcagcatgaggtctcttccatctggtgaggaggaatgtctagtagcactgaggctagtgtggccatgggcaggtcctctcacataggtgtccttgaccacttccttcaagttttgaggagc

SEQ ID NO: 1626 - DNA, 585 bp, Mus musculus
tgatgagaaggtcaaagtgttgaagtgtatctcagaggtggaaactgacaacgtggtccttggccaatatgtggggaaccccaatggagaaggagaagctgccaatggatacttagatgaccccacagtaccccatgggtccaccactgccacttttgcagcagctgtcctctatgtggagaatgaacggtgggacggggtacccttcatcctgcgctgtggcaaagccttgaatgaacgcaaagctgaagtgagactgcagttccgagacgtggcaggtgacatcttccaccaacagtgcaagcgtaatgagctggtcatccgtgtgcagcccaatgaggcagtatacaccaagatgatgaccaagaagcctggcatgttctttaaccctgaggagtcggagctggatctaacttatggcaacagatacaagaatgtgaagctccctgatgcctatgaacgcctcatcctggatgtcttctgtgggagccagatgcactttgtccggagtgatgaactcagggaagcctggcgtatcttcacaccactgctgcacaagattgatcgagaaaagccccagcccat

SEQ ID NO: 1627 - DNA, 504 bp, Mus musculus
gatcacgatctgtggttgttttaattatcttctttctgctgatacaaactatttcctttatttccatctttccatctagtaagttagcaaagagtgccattcctaatcgaattccagttatgtgtgtttctgagtgggtatttaaggacaattctgatttacaacttagtcttagaaaatagagaatttaaaaggcctaacttgcttgtttctaaaagcattttaatttgcggatcaactataaagaagcgttaaatactctttatttgatatcatacataaaccacagtaaatgcctttcaatagtaaaaggcaacatccttgatgtagggaattctaattaaaactgcactgtcaagaatagacagttgcctcctggtggttagccatgacctgaaagaggccagtgaacacaaactgaaacacatttgagtcttcttgtttctgagacagtgatagaattttcccagtgtttaagcatattcatatgcccagttatataaa

SEQ ID NO: 1628 - DNA, 604 bp, Mus musculus
gtctgtcttcgagtccgaacgttcgtggtgttgaccagcccggaacgaattaaaaatgggtgatgttgaaaaaggcaagaagatttttgttcagaagtgtgcccagtgccacactgtggaaaagggaggcgagcataagactggaccaaatctccacggtctgttcgggcggaagacaggccaggctgctggattctcttacacagatgccaacaagaacaaaggcatcacctggggagaggataccctgatggagtatttggagaatcccaaaaagtacatccctggaacaaaaatgatcttcgctggaattaagaagaagggagaaagggcagacctaatagcttatcttaaaaaggctactaatgagtaattccactgccttatttattacaaaacaaatgtctcatggcttttaatgtacaccataatttaattcacacaccaaattcagatcatgaatggctagcaatgtttttgttggacagtcctgatttaagtaaaactgacttgtcataaagtgggtacggtctttattaaagcaacagttccagttgtatacatgctaccacggctctccctttctcaagataagattggactt

SEQ ID NO: 1629 - DNA, 152 bp, Mus musculus
gttttaacttccttgcataatttactcaactggcagaaggattctataacagaatgtatacaatttagtaattttacaaaacattaatttagctagatgacattggttacagtcaccagcataaaacactcgggactttgtactgccacttc

SEQ ID NO: 1630 - DNA, 558 bp, Mus musculus
ccctggggacacaggagcctggaattgaactccccatcgagccacgacctaatgaagaatgtctgcagatactggagaatgcagagaaaggtgcaaagttccttagtgatgcagagatcatccagttggtcaatgccaagcatatcccagcttacaaattggaaactctaatggaaactcatgaacgtggtgtgtctattcgccggcagctcctctccacaaagcttgcagagccgtcctctctacagtacctgccttacagagattataattattccttggtgatgggagcttgctgtgagaatgtgatcggatatatgcccatccctgttggagtggcagggcctctgtgcctgggtgggaaggagtaccaggtgccgatggcaacgacggaaggctgtcttgtggccagcactaacagaggctgcagagccataagccttggtggaggtgccagcagccgggtccttgcagatgggatgactcgaggcccagtggtgcgtcttccacgtgcttgtgactctgcagaagtaaagacctggcttgaaacacctgaag

SEQ ID NO: 1631 - DNA, 465 bp, Mus musculus
ggggctgtgtggttcatttattggggccatgtccagccatgccgcagccacctgggcaggagcccagtgcccccccagaaggcaggtgggggaagggaggaagtgcagaaggctcagtgccccagggttccaccccagtctggtcttggtccttgcagagagccggtcactcaggtgagcgaggtgtcatcgtcgctgccctctcctcccgcaccgcctgcccgctcctcgcggctctctgtcactgcactctcatcgatgttctccagtgagtctgcatgttgcaccgacaactctgacagcgccaggctgggcaatgggctctgctccgggtgcagccatggcttgaaatgaggctggtgtttctgcttccactcggggtacttgatgcaggccttgtacatcttcttcatggccttgggggccaggaactgagatgacttattcaccacccacttgggtaag

SEQ ID NO: 1632 - DNA, 548 bp, Mus musculus
ggtgcccgatgaccaggacttccgcagtttccggtcagagtgtgaggccgaggtgggctggaacctgacctacagcaaggccggcgtgtctgtgtgggtgcaggctgtggagatggatcgaactctgcacaagatcaagtgtcggatggaatgctgtgacgtgccagctgagacgctctacgatgtcctgcatgacatagaatacagaaagaagtgggacagtaatgtcattgagactttcgacatcgcccgcttgactgtcaacgctgacgtaggatattattcctggaggtgtcccaagcccctgaagaaccgtgatgtcatcaccctccgctcctggctccccatgggcgctgattacatcattatgaactactcagtgaaacaccctaaatacccacctcggaaagacttggtccgagctgtgtccatccagacgggctacctcatccagagcacggggcccaagagctgcgtcatcacctacctggcccaagtggaccccaaaggctccttacccaagtgggtggtgaataagtcatctcagt

SEQ ID NO: 1633 - DNA, 164 bp, Mus musculus
  misc_feature (1)..(164): n is a, c, g, or t
cctcctcctctccttctaacctacccaccttttgttgcttgtttatgtcttgcgcttggttttattttgttttgcctttgcgatgggcgtttcatactagttaggacaagcaagaaaccctcgcntctgngggactcgtgacagttcgcctgcctcagcctcca

SEQ ID NO: 1634 - DNA, 420 bp, Mus musculus
ttcgaactggacagaggcgtaaagctgttccttctcatccttacaggggtttggctcttggggaagttgtgctgattggaaatggagggacaccacatacgtgaaagccacacccaaaccttacccatcgaggtcaaacaatgctcctgggcataactgctcttccttctgctcccctgcacacaggaagagcaggccattgtctgggcccctagcccccagaggaataaaaggtttgtcacaggggaagaccctggccatcacgttgaagagcagtaagggagccaacaaaggggtttacttgaccacacagactgccaagagcaaaccctggaggtgacctgcatttgctgactatactggcgatgccccctggatcctctttggcaaatgaaggctttcttagggatacaacaggga

SEQ ID NO: 1635 - DNA, 496 bp, Mus musculus
ccacgtaaactggtcttttattagcatggaccattggatacggcagcttccagcatgccgagggagtgagggaggcagggagccggcaggcagcgggctctcacttcttccactcattcttgtcatagtcccacttggcggagaagccctgaatggggttggccttcatgtccagcattcgcttggtctgcatggccacccagtcacgatcgaaagtatgagggatggggccatacacatagctcttctcccaaatcagaacgagcgcagtgaagccaatgaagaacatggccatgcccacaactgtcttccattcattggtgcccctgttcatctcggcgaagctctcgttaaactggatgcggtacaactgaactttctcatccctggaaaggctgctccagtcggccttctccttctccttcagcgccttctggctggcagacagcatcgtgacatgggccacatcaggcaaggggtagtcacgccgatcagc

SEQ ID NO: 1636 - DNA, 712 bp, Mus musculus
  misc_feature (1)..(712): n is a, c, g, or t
ccgttcttccggtcgcgagcaccccagggtgtagagggcggtcgcggcggtcgcctgggcagcggtggcagaatgttggcttccagatcgctgagcctgattggcaagagagccatttctacttcggtgtgccttcgagcacatgggagtgttgtgaagagtgaagactatgctttccccacttacgctgatcggcgtgactaccccttgcctgatgtggcccatgtcacgatgctgtctgccagccagaaggcgctgaaggagaaggagaaggccgactggagcagcctttccagggatgagaaagttcagttgtaccgcatccagtttaacgagagcttcgccgagatgaacaggggcaccaatgaatggaagacagttgtgggcatggccatgttcttcattggcttcactgcgctcgttctgatttgggagaagagctatgtgtatggccccatccctcatactttcgatcgtgactgggtggccatgcagaccaagcgaatgctggacatgaaggccaaccccattcagggcttctccgccaagtgggactatgacaagaatgagtggaagaagtgagagcccgctgcctgccggctccctgcctccctcactccctcggcatgctgngagctgccgtatccaatggtccatgctaataaaagaccagtttacgtggaaaaaaaaaaaaaaaagcggccgctaccct

SEQ ID NO: 1637 - DNA, 565 bp, Mus musculus
ctgaaggtggggtgccattaagccctttatttcatagctgccattgcacttatggataaggtcacttgggtttcaggcaaaccacagagaaaggatgaaatactgacaagaacaacctttcctcagggagaggagagccggccaaggaacagaatctcattggtcttaatgtgctgaatgaagaaaatgaaggggcggttaacacagaaacaaggggtggaccgtgatgaccccttcagaacaattgtagtggcagctgtagcctctgagccttcctcattcacctccacaacagatttatgtatgacattggacagaaacaagccttgcttggaagatattccagaaaagtctgctctgccctcctcaaaggcatcagtcatgcccagcttgcagaggacatccttcatgtcatagttctcctccagcttaaaccatgggaggaaaacctccaccttttctcctttcatcctgtccagcctcgtccactctataaatttctcatgagttatttccttttccaccgtactcagttcaacgtgttcatctggaagcatgatgatca

SEQ ID NO: 1638 - DNA, 615 bp, Mus musculus
atctctgctcatcttgctatctccaggctcaccatgatggatcctctgctggaagcaaatgctacttttgccttaaaccttttaaaaatattgggtgaagacagatccaaaaatgtatttttatcacccataagcatctcttcagcgctggtcatggtcttattgggggcaaaaggaaccactgcgatccagataactcaggcactgtctttgggtaaatgcagcagcagtgaagatggagacgtccaccagggcttccagttacttctcagcgaagtgaacaagactggcacacagtactcgctcaaagcagccaacaggctcttcggggaaaagacttttgatatcctagcatcttttaaagattcctgccacaagttctatgaagcagagatggaagagctggactttaagggtgctacagagcagtcccgacagcacatcaacacctgggtagccaaaagacagaagataaaatcaaagagttgctatctccaggtacaatacattcaaacactccactgatcctcgtgaatgctgtctacttcaaaggaaagtgggagaagcagtttaacaaagaggacaccagggagatgccattcaaagtcagcaaga

SEQ ID NO: 1639 - DNA, 538 bp, Mus musculus
aaggaaaacttaccactgtgtttattttataaaatgtatttgcagaaatcttatcagacacaagtgctataaaaataaatataaaatatacacatttacatattgcttataatacattatttacacattcaaaaattgaaaactatgttttgtccgtgattctcaatgtcttattagtaaagaaaataacaaaaacaaacaagccatacacaacttagttcaatacaaacataggagcacaaactttgaaggattacatgcttggagcaaaattagatgtcctagccttatgaccactatattaggtaactgaaattttattgttttcttattatatttttattgggtatattaaaattctgtttaatagaaaggctttctgaagttaaagtaaatttaaaaaatcacttacttgaaagccagccaaaaagtcatttattaaatatagacttctgagacttaaattactgaaaattaggagttggattagaaaacatcagaaggatggaagaaagacactgtaatttctgtttgatgt

SEQ ID NO: 1640 - DNA, 609 bp, Mus musculus
agcaggcgtcagcaagcagactgagcgtgaatagtgccgctttccccacacagtccccaggactcagtccttccactgtgacagttgaaggacttggccacacagcgactgccacaggaacaggcgtctcttcaagtcttcctaaatctgcacagcttttgaaatctgtttttgtgaaaaatgttggttgggctacacagctaactagcggagctgtgtgggttcagtttaatgatgggtcacagttggttgtccaggcaggagtatcttccatcagttacacatcaccagatggtcagacaactaggtatggagaaaatgaaaaattacctgaatacatcaaacagaaattacagtgtctttcttccatccttctgatgttttctaatccaactcctaattttcagtaatttaagtctcagaagtctatatttaataaatgactttttggctggctttcaagtaagtgattttttaaatttactttaacttcagaaagcctttctattaaacagaattttaatatacacaataaaaatataataagaaaacaataaaatttcagttacctaatatagtggtcataaggctaggacatctaattttgct

SEQ ID NO: 1641 - DNA, 404 bp, Mus musculus
aaaatgggacatgagctaccccagtcctttactcagttttattaacaacactaggattccaacatcaggtccccagaccacgtacactgcccctcgtcccttaagaacacttccatgggtgatgtgaagtgtctttactccccgtgcgttagtgacacatctaattcttagacaggaagtctgcatggcacaggacaggaacactctgcagatgtgctgcgtcgtcacacaacccagccagggccatcgacaccacacagggagtcccagctgcaactccactcgaccgtttccaaacaatgcaaaagtgcagaggactgcgtcaaatataagactctttcaaaaggatctatggcgtttgctttgctttcttttgctctttaataaaaaaacaatcagccttc

SEQ ID NO: 1642 - DNA, 165 bp, Mus musculus
tgacccttggattgtgccaatcaaggactttgagaaacagcttaatctgaccacagaagatgatgacattcaccatatgactgtaccctacgggaggccccggattctactgaagcagcaccgtgtctgactactccagcagcaacagtctcttgaccggataca

SEQ ID NO: 1643 - DNA, 629 bp, Mus musculus
caaaatacatgcttcaacagatgcgccatggattttcatccacctctgttgataacgcctggttatctgtaccttgcttctcaaaaagagtcattaaacaaggaggtaataaaaaaatagaagctttccagtttacagaacgggacttcttcctttggcaaaatgtatcagactctggtgctcagatggtgagcactgcacatttggacaggtacagccctgtagtgctccagaactctgacgccagaaggtaatggaggatggacgcgtcaaactttccctcagtggccctaggtaggtgcgtcagtggcttaaattagttaggcctttagtttctaattccctttttaaagttgtcacctgagaacaactcgactctgacagcacacacaggaagtgaggtgttctgcttggctagcaaacactggaaccctgcagtcacttcagcgctttagacatttagagagctacgattttacaactgaagaaaggtctgggaggacaggtacatcgtaaaatgacattgtgcactctttgtggaaagaggcatatttcaaataactgaagtatgctcccaggcttcacacggcctccaggccctgttctctgcaatgctgtttggttttaag

SEQ ID NO: 1644 - DNA, 610 bp, Mus musculus
gaaaatgagcacctggtccaggaggcccttgaccggctgatggaagggagaaccgtgctgatcatagcccaccgcctgtccaccattaagaatgccaactttgttgctgtccttgaccacggaaagatctgtgattttctggacacatgaagagctgctcctgaagcccaatgggctttacagaaaactgatgaacaagcagagtttcctgtcatataatggagcagagcagttcctggaacctgcacgggcgtagcctgcagtgcaggtattgggtaactgaagcagggctgtgactctatcatataccctgtccacagacagaaacagagcagcagctacccgtgggctgagagaccttaaaaccaaacagcattgcagagaacagggcctggaggccgtgtgaagcctgggagcatacttcagttatttgaaatatgcctctttccacaaagagtgcacaatgtcattttacgatgtacctgtcctcccagacctttcttcagttgtaaaatcgtagctctctaaatgtctaaagcgctgaagtgactgcagggttccagtgtttgctagccaagcagaacacctcacttcctgtgtgtgctgtcag

SEQ ID NO: 1645 - DNA, 742 bp, Mus musculus
agttctatctcatgacatccctgggctgaaggaaatggtataaatgaggcttcacccctgatcctagggagctggacagggcaactcagaccgttaaaaggcagactacagtgtaggtagacaaaggccactctacccaagatgaataatcatttacaagaaatctcttgcatgctcagatgtcagctcccttcagtgaggtctggaccccactggatccatcatctgtgcgatcttggctgtcagatcttgttccagagccagggctgggcagaagcaacagcagaatgtgggagcctgatgatgggtcatggagctggagccactgagcatccccaactggtgtggtgcctggtgttccctgggcctcattagcatatcagaccttcagaaaagctaagtaacctttataagggagaacaggggcctgggaggctcctgcactcccgtgttgatgtccagtatgttccggatgctcctgacttcactgcttggtagattgcccttgatggccaggatggcgttcaggtggcctttgctgaagtcagggtaccaagtggcgtatgtggccgcctcgatcttaatggcactggaatcttgcaggcgaatgatctcagcaatcatagggagggcgcggtgcggccaggttgcagtggagccattctcagtgcagaacccctgaatggcatccgcgttggccaggatgtgccttgcagctgctgctgctgctcggccgtcttga

SEQ ID NO: 1646 - DNA, 581 bp, Mus musculus
gccatcgacattctccagatcatttcacaaggccagactaaggctgagaacatcacttcggacgtggggatgcagataaagcagttgctgctggtggagctggctgcactactgaggagctaccagcgcgcctttgatgagtttctagagaagagcaaactcctgaggaattacagagtcaacatcatggccaacatcaacaactgcctgttcttctggacttccgtggagcagaaatggcagatatctcatgattctctgaaccgcctgctggagcctttgaaagacctcaaggcccatggcttcgacaccctgctccagagcctatttttggacctgaagccgctgtttaagaagttcacacagacccgttgggcaaatccagttgagaccctggaggaaatcatcactactgtgagcagcagcctgcctgaatcctcagagctgcaggactgtttccgggaggagctcatggagactgtgcacctgcacctagtgaaagaatacatcatcaggctctgcaaacggcgcctggtcctcaagacggccgagcagcagcagcagctggcaaggcacatcct

SEQ ID NO: 1647 - DNA, 829 bp, Mus musculus
gctgtttgaaaatgtgatcatattcttcataactacagaaaccatgtcactggaccagggttccgcagtcacagagaggcgctaacgaacaggcaggagagcattttaattcaagatacattctttagtttatattctagaaaatcacatttttggtactttgataccatgtggttgaccacagaaatagctgccacagtccacggctacaggagctgagctctgctgaatacaggatctgaaatgaatcaagtctcacgctatttacattctgtcagtggccaaagcaggagtttgtgcatttacagatatgtattaggacaacgtattgattcccgggatttaagaaacacagtcacagctgagtacagcccaccagcaccttccagcagccataggctctgcaaacacacaggacagctcgacactgaacacttcaaatgtattcagagaatttcaaaacaacgaacgccccctccccgagtctaagcaaagcaagtttgacacttctgtgagaccagtggaacctgcagctcagacttcaggattctgtcattagaatattgtttaactttttcataggaaaaagactaagggaagatcaaattcagaaaacttatttatctgaatccaatcagatccatcattcagagacattaagacaccttgcaaagaactcaagaggtgtatgggcattcctggtcgggacagacaccaaccaggaaatgatcctcccaggccggcctcacagtgtcttaactgcgtcatcttctctctttgtgtacctgagagttatatatccacaacttataacctggtcactggagtt

SEQ ID NO: 1648 - DNA, 567 bp, Mus musculus
ccacggacaccctggattctactgggaaggtaacggaagagaagccgtatgataaaataacacgagaagatatcgaaggcattctgcagaagtttactgggaatataatgcaagtacccccgctctattctgcgctgaagaaggatgggcagagactctcaacgctaatgaagaaaggcaaggtggtggaggccagaccggcccggcccgtgactgtccacagtatctccctcctgaagttccagcctccgttcttcacgctggatgttgaatgcggaggaggcttttacatccggagcctggtcagtgacatcggcaaagagctctcttcctgtgccagcgtgctggagctgacccgcaccaaacaggggcccttcacacttgcacagcacgccctccccgaagacaggtggaccatcgatgacatcgaacagtccctcgagcgctgcacgtctcttctgccggaggagctgacatttaaaaaactaaaatctgacaactccagtgaccaggttataagttgtggatatataactctcagggacacaaagagagaagatgacgcag

SEQ ID NO: 1649 - DNA, 724 bp, Mus musculus
gtttttcatggttaaacaatttatttactgtaaactttagacttttctcagcaaaaaaaaaaaaaaaacccaaaaaaacaaaaacaaaaacaaaaccccaaaaaacaacaacaaaccaaaaacaaaccaaacaaacaaaaaaacaaaaacaaaaacaaaaacaaaacaactgatgttgtccctcaaatccctgcctgcaacactccatttgagtaaataagtggagtgagagagaaagggcccattgtcacagcagaaaggtccaagacacaggatatttcaagtccaagggtacaggaagaaaactctctcctttagatatggatttccagcagcaatatatatcattcttaatacttgaccagtgaggtagatacatgaaaacatcatccagacagacagacagacagactcagtcctccagaaccaacactcttcagacagaaacctttaagttccatacaaagaggaactgaactatacaagaaaacaataagcactcaaatacagtttctctctcttgtttgcagcttaaaaaatagaataaaatttaaaaaaaggcagaaggatgtgcctccccttctgcaaatctctatacaattttattctaaagttattacactcaagttaaatagtctggttagtgtcctgtcaaggaggggtcttagagagtagaaagcctgtattacagtggcgagtcatttgtactacagttccttccttg

SEQ ID NO: 1650 - DNA, 525 bp, Mus musculus
gatcgctatgttgctatcacatcgcccttcaagtaccagagcctgctgaccaagaataaggcccgagtggtcatcctgatggtatggattgtatctggccttacctcctttttgcctatccagatgcactggtaccgtgccacccacaagaaagctatcaattgttacaccgaggagacttgctgtgacttcttcacgaaccaggcctacgccatcgcgtcctcgattgtgtctttctacgtgcccctggtggtgatggtctttgtctattcccgggtcttccaggtggccaaaaggcagctgcagaagatagacaaatctgaaggaagattccacgcccaaaacctcagccaggtggagcaggatgggcggagcggccacggactccgaaggtcctccaagtcctgcttgaaagagcacaaagccctcaagactttaggcatcatcatgggcacattcaccctctgctggctgcccttcttcattgtcaatatcgtgcacgttatcagggacaacctcatccct

SEQ ID NO: 1651 - DNA, 781 bp, Mus musculus
ccacatttaaacgtacttctcctcgaaacataattggttttgcaattaagattctctgaactggttcagagtcatcaaaaaccacaaaaccaaaatttggaagttttcccccaacacccttggtattgatgcgaagttccacaacgtttccaaaactcataaagaattctttcagttcattttcatcaatatcatgaggcaagttaccaacgaaaagctgatgactgtccggatagcgaattattctccggttgtcagagtcattctgttccatatctcctctgcctggccttggtcctcgaggagggaaaccaggccgctctcgaggtcgctgttcccgtacacgcggtggctgagactgaacttctggcttagcatcaaccctcggctttggcggttcctgaggcagagaagcaggctcagcaggaggaggagtggccgacttctcctccagctcttccaagtgtttctcctccacttgtggtttcagctcttcagtctttgtttcagattctggctcaggctcaggttcatgagaggattcttctaaaggctcctctatgccattagtcacggggtgtgcgtcatagtaagcgctgttagcattctcttgcacaggttcaggagacggctgcctgtcttcttgctcctcttccacttcatcttctgactcttcatcaagttctggttcagaatcaccaaacacttcatcttcataacgaaacatatcattgtgaacataaaatttatttgggacagatccttctggagccagaacaaa

SEQ ID NO: 1652 - DNA, 546 bp, Mus musculus
cgggacggactgcaagctgtcaaacctgagggtttatttttgttgagtcgaaagtgaaattttcctttggccggcgtgacagcatttgacattgtgcagcaaagaaatggttatggagaaagcccagtccgctgcttgtggggcgggagtttttgaggcaatattatactttgctgaataaagctcccgagtatttgcacaggttctatggcaggaattcctcctatgttcatggtggagtggatgccagtggaaagccccaggaagcagtttatggccaaaatgatatacaccacaaagtgttatctctgaacttcagtgaatgtcataccaaaattcgtcatgtggatgctcatgcaaccttgagtgatggtgtagtggtacaggtcatgggcttgctgtctaacagtggacagcctgagaggaagtttatgcaaacctttgttctggctccagaaggatctgttccaaataaattttatgttcacaatgatatgtttcgttatgaagatgaagtgtttggtgattctgaaccagaacttgatg

SEQ ID NO: 1653 - DNA, 529 bp, Mus musculus
ccttagataatatatattaaaaataaacctccagtccaggatataaaaacatagcaaaggcacttggggtaggggaaggagggtgaccccccataggcaatactgagacggcctgaaaagtggggattaagggggtgctctgggagtgaagccctgagttccccaagcagaaggcaggagggagaaaggcagaggccagagtgggaggcagggacccgagcaggtctgctatcaagttcagccaatctccctctgctccaggcctctggggtgtgagatgctgtggcagctgtgggggtgggggtgggccccctgcatcctctcccccactcttctcttcatgaaaggcctgtccgagcagagcgttcaggtgcagccaggttgggggacagagtcccccaagctgggacaagaggggtcttaggcgacaaaattcctcttccaactcctccagttgtctgatggccacctctaagctaagcaagttttcctcaatctcctgggtgtgcactgggccgggggcctacca

SEQ ID NO: 1654 - DNA, 786 bp, Mus musculus
  misc_feature (1)..(786): n is a, c, g, or t
agaacccctgctcagcagctctgagaatggcactggaggcgcagagatggctccagctgatgccaggacagagcggctcctcaatgacctcctgcccttctgcagaccagtcccagagggccagcttgctgccacagcccttcagaaagtactgtccctgaagcagatcctgctaagcactgaggaagacagtggagcggggcctccccgcgatggggatggggtgcctggtggtagggcccccggcccagtgcacacccaggagattgaggaaaacttgcttagcttagaggtggccatcagacaactggaggagttggaagaggaattttgtcgcctaagacccctcctgtcccagcttggggggactctgtcccccaacctggctgcacctgaacgctctgctcggacaggcctttcatgaagagaagagtgggggagaggatgcaggggggcccacccccacccccacagctgccacagcatctcacaccccagaggcctggagcagagggagattggctgaacttgatagcagacctgctcgggtccctgcctcccactctggcctctgcctttctccctcctgccttctgcttggggaactcagggcttcactcccagagcacccccttaatccccacttttcaggccgtctcagtattgcctatggggggtcaccctccttcccctaccccagtgcctttgctatgnttttatatcctggactggnaggttatttttaatatatattatctagggaaaaaaaaaaaaaaaagcggccgc

SEQ ID NO: 1655 - DNA, 516 bp, Mus musculus
gttttcacacagttctgcaattttcaagttttctatagtaagtaggtattattttctaacttggaaaaccacaggctttaaaacaagtcccactgagggtctggcactgagaacgcacgtgggtatcttcactatgcagggacaacgctacagcttcatctcctccagcgtttggagagcacacactctttgggtgacaagctcacattactttgcctttcatgtatatttcattactttaattaaaaggtaattgattaggatatggtttttcctgtagcctaaatgaatactggtttttactagattcttctattccctagaagatttaaaatagtggccttttatctttaaagaaaggcatactgaatacacacaccacatgcttgctttctaaacaaacacaaaaatcattctaatttatacttttcctccatcatgtaaaaaaaaacaagaaacagaaaaaaaaacaactcatctatgtcagtttagcagtcttttcgatcacaaacatgc

SEQ ID NO: 1656 - DNA, 599 bp, Mus musculus
gatagtcacgaatgagcaaccggcgcgtggtggtggtgattgtagtcatctggactatggccattgtgatgggtgctatacccagtgtgggctggaactgcatctgtgatatcgatcactgttccaacatggcacccctctacagtgactcctacttagtcttctgggccattttcaacctggtgacctttgtggtcatggtggttctctacgctcacatctttggctatgttcgccagaggactatgaggatgtctcggcatagttctggacccaggaggaatcgggacaccatgatgagccttctgaagactgtggtcattgtgcttggtgcctttattgtctgctggactccgggattggtcttgttattgctggatgtgtgctgcccgcagtgcgatgtcctggcctatgagaagttcttcctcctcctggccgagttcaactctgctatgaaccccatcatctactcctaccgcgacaaagagatgagcgccaccttcaggcagatcctgtgttgccagcgcaacgagaaccctaatggccccacggaaggctctgaccgctctgcctcctccctcaaccacaccattctggct

SEQ ID NO: 1657 - DNA, 469 bp, Mus musculus
cttctttctttattgttaggtacagcatataaatacataaaggcaagaactagggactttcttaggcttcaaaacaaaaacaaaaaacccaaagaagtcttaaaacttttttctgaaagtataaaatcatgagtgcttagaccgagggtggtactgcaggcagaggcagcaggaagcggacaagctccgcctctcttccagagcacgcacctcacaggggcacacctcacagcggcacctcgcagcgaggtttccaccagcagtggatgctgagccagggatccccccccccttccatggggaggagaagaggaagcacagtcattaaaactccttcttcccgctccaaactgaggaaaagaacatcgcctctccccagctttcctgggcatgatgccctgaggttgaaatttacccaacctgtccaactcagttcctaaccaaagccagaaggtgcccaaagttttct

SEQ ID NO: 1658 - DNA, 576 bp, Mus musculus
gactgcaggagtacctggtcacctgtgctgatgatgtcatcaagatgatcaacatgggcagtgcctgcaggacttctggacaaacatttgccaactccaattcctcccgctcccacgcctgcttccagattcttcttcgaactaaagggagattacatggcaaattctctttggtggatctggcagggaatgaacgaggggccgacacatctagtgctgaccggcagactcgcatggagggagcagaaattaacaagtctctcctggctctgaaggagtgcatccgggcgctgggacagaacaaggctcacaccccgttccgtgagagcaagctgacccaggtgctgagggactcgttcattggggagaactcgaggacctgcatgatcgccatgatctcaccaggcataagctcctgtgaatacaccttaaacacgctgagatacgcagacagagtcaaggagctaagcccccacagcggacccagtggagagcagccggttcagatggaaacagaagtgatggaagccagctctaatgggacgtctctgactggcaatgaagaggaggagctgt

SEQ ID NO: 1659 - DNA, 452 bp, Mus musculus
  misc_feature (1)..(452): n is a, c, g, or t
atttntgaatttaatgtagcttgtggttcggtgtagagagctcagggtgaccacacacactctaccactgagctatgaccctggggccccaaaagcaattatttacagcacaaactttttgacacatccttcagtgtgtgcagagacacacatccttcagcctgttgcagagtggagggacagatgtggaaggcagtgtgtggcttctggcctctgataccactcaaggtcctagcgtcatcggatggtgatgggcagctttgaacaagacacaaaacaccaactttctccagctcttggataagcaggtccttctatatacagtactcctggctcaaggctgctctgctccttccagactcttgggccttctccagaactggcctgagtgcagctgagactcctgcgagaggcccagagatctgtcttctgagacagagtaagtatgccca

SEQ ID NO: 1660 - DNA, 609 bp, Mus musculus
agaaccaaagaaaggaattccacagtcccctgcaccacccacctcccacaccagccagctccactgtttccaccacagaggacacagagcacctggtctataatcacacaacccagcctctctgagcctgggactcttgccagtcttaccaggtcctgcttgccaagacagaagctagaacctggaaaaacttggggaccagactcttcctacctctttcctgggcatacttactctgtctcagaagacagatctctgggcctctcgcaggagtctcagctgcactcaggccagttctggagaaggcccaagagtctggaaggagcagagcagccttgagccaggagtactgtatatagaaggacctgcttatccaagagctggagaaagttggtgttttgtgtcttgttcaaagctgcccatcaccatccgatgacgctaggaccttgagtggtatcagaggccagaagccacacactgccttccacatctgtccctccactctgcaacaggctgaaggatgtgtgtctctgcacacactgaaggatgtgtctttgtagtttgtgctgtaaataattgcttttggggccccagggtcatagctcagtg

SEQ ID NO: 1661 - DNA, 460 bp, Mus musculus
cctcccctggagaccaggactcacatagccaaggttgtcctgaaactccctatgtaggcaaggatgagcctgaacgcctgcctctcctgcttccacttcctgagtaccagattacaggtgtgcaccgacacacctggtttatgggttggcatgggccgaatccgcagacagccattcctgtgccatgagtgtgggtgccgggggctcagcaccacttacttgttgctggggatgggcacattggttaggagtgagaagttgcttcgaacgttgcggagactggccagcacctggggtgggggacagctgtaaggagaggcctctacctgcaggaaccaccaggctgggtcccttccccatgagaggaggaggtctcacctgggcaaacggggtcacaatgaggtcttcaccaagcctgaaatcaagaacagggacaggtgaggactccagggatagtcga

SEQ ID NO: 1662 - DNA, 473 bp, Mus musculus
tggagtcctcacctgtccctgttcttgatttcaggcttggtgaagacctcattgtgaccccgtttgcccaggtgagacctcctcctctcatggggaagggacccagcctggtggttcctgcaggtagaggcctctccttacagctgtcccccaccccaggtgctggccagtctccgcaacgttcgaagcaacttctcactcctaaccaatgtgcccatccccagcaacaagtaagtggtgctgagcccccggcacccacactcatggcacaggaatggctgtctgcggattcggcccatgccaacccataaaccaggtgtgtcggtgcacacctgtaatctggtactcaggaagtggaagcaggagaggcaggcgttcaggctcatccttgcctacatagggagtttcaggacaaccttggctatgtgagtcctggtctccaggggaggaaaaaaaaaaaaaaaagcggccgc

SEQ ID NO: 1663 - DNA, 454 bp, Mus musculus
agggtattaaaatttattagaatctagaatccagctacaagaacatgttctcataacaggtactgatagaaaaacagtttatggggcatacaacatggggcctcccctccaggactacattatcttgtcaatacttaggttgtggtgattttcaagaggggccaggtagttctaaagcatttataggggctataggttagtctggttctaggtaaatactctggctgcaatatcaactaaatttatgctaaaatatgcatagaccacagaagcagacccaacaatttaggcagttgacagagtagtaacagcagtctgagtcagtcttagaaagggggagccttggtttaacttagtggaagagcacttgcctagcatgcacaaggcacccagattcaatccccagcaccttaaaaaattataagaaagaaaaagagaaggaaaacagaaacac

SEQ ID NO: 1664 - DNA, 580 bp, Mus musculus
taaggtgcaagccaggttcagcactccagtgttgttgaactgacaagttgctaaaggaaactgtaactggactgactgttgcttattgcttccctctctctgtcattgttgcttcttgttgttacattgctttgtgttgtctttctaagcccagatgttctccgataattcacactgccctgattgtgggcagcagtggttccctagtttagaactagggcactggttgtaccaaactgaacttgttgaaaatgaatgttaccaagtgttcttagaccgtattaacagggctgactactgccctgagtgttaccctgacaatcctgctaatagaagccttgttctgccttggtctttcccacttgagtgggcacctcaaaatcttaccaggtggacctttgaaaaagcttgccatccatttcttctgggtcctccactggttagaaaaaagatacatgactccagggtagctggctttaatcctgcattacaattaattttgtccagaacagacaaaaccttaaacaagaaacttggccaaagcaaatgacttctgtaacagaatcgtggagactctcaa

SEQ ID NO: 1665 - DNA, 349 bp, Mus musculus
  misc_feature (1)..(349): n is a, c, g, or t
ccttcccaatatcatttacttttttccccaaaaaaccgtattacaactctctcttgtaaaaaataaatttcagaacagggcattttaattgatctcactgattatattaaagataattctatcatttcagaattcagcaatgaatgtccaactatggctaaaaggtccaccctgagaattaaatgattttttgaacaaacccattggggtttataaggctgtgttaacctaatgtcaggaagggacacgagatatctgtgcaaatgcccctgctcattttccagnacagttctccagggatgcagggttgtaagcatcctcattgtcttcaacgctcgaagcatctggg

SEQ ID NO: 1666 - DNA, 586 bp, Mus musculus
gctggagaagtttgatgagctgagatttggtcagctccgaaagaagatctggattcgaatggaaaatccagcttactgcctgtcggccaagctcattgccatctcctccttgagcgtggtgctggcttccatagtggccatgtgtgtgcacagcatgtcggaattccagaacgaggatggagaagtggatgaccctgtgctggaaggtgtggagattgcctgcattgcatggtttactggtgagctagccatcaggctggttgctgctccatcacaaaagaagttctggaaaaaccctctgaacatcattgactttgtttctatcattcccttctatgccacgttggctgtggacaccaaggaagaagagagtgaggacattgagaatatgggcaaggtggtccagatccttcggctcatgaggattttccgaattctgaagcttgcccggcactctgtagggcttcggtctcttggggccacactgaggcacagttaccatgaggtggggctactgcttctcttcctttctgtgggcatctccatcttctctgtgcttatctactctgtggagaaagatgaacac

SEQ ID NO: 1667 - DNA, 533 bp, Mus musculus
ctaggtagtagacagcagatcattttatttaattcttttgaacagttggatcaagcaactttaaaaaaaggctgagcttaaaaatctcacaagtgtattatttaaaatggttacactaaaaacaatcaggttttaacttctttcatttcagaggaggtctttctgttataaaaattacccctaaaactcacaaaaacctaaaccaacattaaaaagctggtccttgtaccttcacaggaatgaatgaggaagatgtgggaaagggagggtcacgtgtgtctggccgggcatgggccctcccagcgtacacgctgggctcccacttgacctgtgggagttctaccataggagaactgttcagtcatctaagcctatgtttctgaaaaggtaggacatggactccccgttgtgaattcggcggatggcttctgagaggatcatgctgatgtccacagtcttgatcttggggcactgcagcttctggatctcgtgtgggatcgtgttagtgaccaccacctcatcaatggcagact

SEQ ID NO: 1668 - DNA, 536 bp, Mus musculus
  misc_feature (1)..(536): n is a, c, g, or t
tgcaaagctggtctgactcatctcatcactatggatttacaccagaaggaaatccagggncttcttcaatattccagtggataatttaagagcctccccattcctgttacaatatattcaagaagagatcccagattataggaatgcagtcatcgtggccaagtctccagcctcagccaagagggcacaatcttttgcagagcgtctacgtctgggaatcgcagtgatccatggagaagcacaggatgctgagtctgacttggtggatggccggcactccccaccaatggtcaggagtgtagctgccatccatcccagcctggagatcccgatgctgattcctaaagagaagcccccaatcacagttgttggtgatgttggaggaagaatcgccatcattgtggatgacattattgatgatgtggatagctttcttgctgcagcagagaccctgaaggaaagaggtgcatacaagatctttgtgatggccactcacggcttgttatcctctgatgctccccggctgattgaagagt

SEQ ID NO: 1669 - DNA, 428 bp, Mus musculus
atttaatagaaggcaactttattttataaatcttcaaatacggttgctttaaaaccttcagcgttaggattatgggcttttctctcttaagaaaaaggcgtcccagggtctccaacccgggaatcagctgagattatcctgttatctctgcttacgcatgttgacatatgtgtacatatgcgtacatagttttcgtgtggaaaaatatttcggttctgattttgaagcacatgctattaacagcgacaattttcttcttcaatactaaaactgtacacaacgtgaggcctgaagaataaacaactttttaaatatcccattatttactagtaaaccctagatcaattaaaaaaaaaagaacgatgtacctacatcaactatacatacataaactgttttttcagaagttattgaaattttttttaaaa

SEQ ID NO: 1670 - DNA, 579 bp, Mus musculus
cacaaccagtgccccagaagatgaaatctcaaatagatatccccgaacagacagaagtggtttcagtagacacaacagagatgcaaatgcgccggctagtttctcctcaagtagcaccttggaaaagagaattgaagatcttgaaaaggaagttgtaagagaaaggcaagaaaaccttcgacttgtgaggctgatgcaagataaagaagaaatgattgggaaactcaaggaagagatcgatttgttaaatagagacctagatgacatggaagatgagaacgagcaactaaaacaggaaaataaaactcttttgaaggttgttgggcagctgacaaggtagaagctgcacgggcggcttcggtgtggaaagcctgcttttacactactgatgaatgtcatggctaaggctgagctgagacgcctgtgattcactgcgttgttgagaggactgtatatttatttctagaaaacacgtggatttttttttcaagattcactctttcattgctagtttctaaaaagtattaagccctgtatttcacatagaagtaacgtttttagttattaaagtcataggta

SEQ ID NO: 1671 - DNA, 468 bp, Mus musculus
ggggtggtagttttattaaaggatttaccctaagcacactcctagcctagtcccgagactacccacacccacactcatcgactaccatgtcttcataatgtcggagaatgacgttcttatcactatcctgatagagcatggagatgggcgagagcttggtggggacacagacagccttggggaccttggggtcagccatatgcatcagagcctgcatgaaagcataattggaactatttaaatacgtggtcattgagaaggggcactctccatgacagtaatttgccatgaaccccttaggggcgatgacccacttgtgccaacccaggtcctggaagttgatgaacagctgatgacggtggcagaagttcctacagaaacccttggggacagagatggccgccctcctttttctggaagaaggatgacagtgtttaggattgagggttaccaccagcagcgaggcat

SEQ ID NO: 1672 - DNA, 552 bp, Mus musculus
cacctcacaggttccaacctgtgcctcgcgtcttaaggaaaatcatccgggctcgagaagccgctgcagccagtggggcctcgcaggacttatgctacgtgaaggagctgggtgttcgtggggacctgcttcagcttctcccagaccagggttttttccttaatacacagaaacctttccaagatggctcctgtctccagaaggtcctctattttaacttgtctgccatcaaagaaaaggcaaagttgaccatggcccagctgactctagacttggggcccaggtcctactataacctgcgaccagagctggtggttgctctgtctgtggttcaggaccggggcgtgtgggggcgatcccaccctaaggtgggcagattgctttttctgcggtctgtccctgggcctcaaggtcagctccagttcaacctgcagggtgcgcttaaggattggagcagcaaccgactgaagaacttggacttacacttagagattctggtcaaagaggacagatactccagggtaactgtccagcccgagaacccctgtgacc

SEQ ID NO: 1673 - DNA, 495 bp, Mus musculus
  misc_feature (1)..(495): n is a, c, g, or t
gatttagatatttttattgaccttttgttcttcaaaatctctcccgaaatggagtaagatttttgactttgtaaacaacacaatttcaagtatatttactgctgtccttggaggctcctangtcctctgctcctcccgtacactggggctaccggaggtgttagcatggagtgctcctgtttccccctttaaagcagactcagcaggctcctggtgctcctgagccctggatctcacagcatgggctgcatagttaaggctggtattttcactccaatgccagtaacctgngaaaggattatagaccaatcctgccacagtttcaactgacagaccatttggttccaagatactctctagcttttcaggtgaaacaaacttttcccacgtatgagtgccttttggaacaatgcctgcaatttgctctgcgaaaacaattcccaaggcataggacagctgtgttttgttcactgccgtaatgaataaagagccacc

SEQ ID NO: 1674 - DNA, 589 bp, Mus musculus
acagattaagccgtgggaactcggtgaacacgggaccatgtgctttagatcctacaggatggctctctcctgtttgagcagagtaaaaacttacaggaccccttggaagagattgtacagtacttcacaaacaacagttgacagcagggaggtcaaaaacttccaggccctggctcacacgtggtgggatgagtacggaaagtttgcgcctcttcattctatgaatgacctacgggtgccattcattagagacaatcttttgaaaacaagtgctagtcaccatccaggaaagcctttatctgggatgaagattcttgacgttggctgtggcggtgggttattaactgaacctctagggagactgggagcttcagttgttggaattgatcccgtggctgaaaacattaagatagcacagcaccataagtcctttgatccagtcctggataagaggatacagtacaaagtgtgttccctggaggaggccgtggatgagagcgcagagtgttttgatgctgtcgtggcttctgaagttgtggagcatgtgagccacctggaaatgttcatccagtgctgctatcaagtgctg

SEQ ID NO: 1675 - DNA, 513 bp, Mus musculus
  misc_feature (1)..(513): n is a, c, g, or t
caggggactgaaagttttatttctgtgaaaatgggttgtgaagggagactagagagcagccctattgggagctgcatggcaggaggccccatctttatttctacctctggggtgggggtggcaatgctggtggcactgaacaacctggacaggaagactggatgccagggctgccagcttgacaaagacttgcccgatgagaactgggagccctgtagtcaggacagcagtgtgctgtcgcctttctagagagctgatcagacgacaggtggaagagacgccacgtacggcaatgacatggcacctgcagacatcgtctcctaagaagccactgggtttagcctgaggaggattatacagtggaggagccttcctgcatggggtggcatggccagagactgatacctcctcatgtgtcactgacttgacattctagagttgagacagcctagtcctgaactgaagactaaaggacctcactgtgtacacatagntgactatccggatagtcga

SEQ ID NO: 1676 - DNA, 530 bp, Mus musculus
  misc_feature (1)..(530): n is a, c, g, or t
gatagtcatcactgtgtacacagtgaggtcctttagtcttcagttcaggactaggctgtctcaactctagaatgtcaagtcagtgacacatgaggaggtatcagtctctggccatgccaccccatgcaggaaggctcctccactgtataatcctcctcaggctaaacccagtggcttcttaggagacgatgtctgcaggtgccatgtcattgccgtacgtggcgtctcttccacctgtcgtctgatcagctctctagaaaggcgacagcacactgctgtcctgactacagggctcccagttctcatcgggcaagtctttgtcaagctggcagccctggcatccagtcttcctgtccaggttgttcagtgccaccagcattgccacccccaccccagaggtagaaataaagatggggcctcctgccatgcagctcccaatagggctgctctctagtctcccttcacaacccattttcacagaaataaaactttcagtcccctgaaaaaaaaaaaaaaaaaaagcggccgcn

SEQ ID NO: 1677 - DNA, 495 bp, Mus musculus
attttagaggcattttatttagataactaaaaatatgagctgttctgaagcagtccttgtacaatgaaagagatcaaaccggttactttatcatgtatttcctcctcttcatcactaggcaaggacaaaaaggcattcttctttaagggaaagtcagaaaaataggccaatatatttttcttcttcataacataaacagctaaaagaaatttaggtgtaaaatggagattgtaagttggcttttcattccaaacagcaggctatggcactatgtgagcacaatcctcctgcctgcacctcagacactcagccattttcactcatgggcaacactgagtagctgttcgtgcactggagctaactcatatgccccaatattttctgccctctttgcctcaggcagacagtaactctgaaggcggatgcttgtctctgcttgtttagtccatgaacatatggtttcggcagcacacgtctgatgctcaggatagtcga

SEQ ID NO: 1678 - DNA, 510 bp, Mus musculus
gagcatcagacgtgtgctgccgaaaccatatgttcatggactaaacaagcagagacaagcatccgccttcagagttactgtctgcctgaggcaaagagggcagaaaatattggggcatatgagttagctctagtgcacgaacagctactcagtgttgcccatgagtgaaaatggctgagtgtctgaggtgcaggcaggaggattgtgctcacatagtgccatagcctgctgtttggaatgaaaagccaacttacaatctccattttacacctaaatttcttttagctgtttatgttatgaagaagaaaaatatattggcctatttttctgactttcccttaaagaagaatgcctttttgtccttgcctagtgatgaagaggaggaaatacatgataaagtaaccggtttgatctctttcattgtacaaggactgcttcagaacagctcatatttttagttatctaaataaaatgcctctaaaataaaaaaaaaaaaaaaaaagcggccgc

SEQ ID NO: 1679 - DNA, 702 bp, Mus musculus
ctttatgtttcaattttatttgttttgaaacagcaacttaatagcttagaaatgttcctaacagcaagagcctgcccaagagcctgcctcaaccccagccctggttccaccccagccctggttcctggaacttttcttacccacatcagccatcagtagtctctctggagacttgggacaaacgaggatgtccatttagagaggagggtagacctaagggtcatcatgtgggagggctgggctcagacaaaactgcctctgttagttttggggtatctgggggcttggtagcatgctcagacagactgtagaagcttggaggggtcctgaaatgcctgactcctggaccagccccttagcacctctccacctgccagactcagaccctgacttttgaagtcggatctctgtaaccttttgtccttcagcatgcctcagagccccacagccagttccaggcctttgcagggtggggaatcaggaagatgatgaggattcagacctgagaatatcccaccatttcctgccatagggcttagggacccaagtgtgccaatcccttcctaatcatcacctaaaagggaacaatacatggacatctctttgtgacttaagaggggcaaacctggcatttcggaccaagtgtggtgggcagtgctgagttccaggctgcaggcggctccaagcatgcactaaagtagg

SEQ ID NO: 1680 - DNA, 656 bp, Mus musculus
  misc_feature (1)..(656): n is a, c, g, or t
gggagggtggctatgtttccatgggtaccatgggtgtggatggcagtaagggagggtagcaacagccctgtgggcccctaccctcctggctgagctgctcctactttagtgcatgcttggagccgcctgcatcctgaactcagcactgcccaccacacttgggccgaaatgccaggtttgcccctcttaagtcacaaagagatgtccatgtattgttcccttttaggtgatgattaggaagggattggcacacttgggtccctaagccctatggcaggaaatggtgggatattctcaggtctgaatcctcatcatcttcctgattccccaccctgcaaaggcctggaactggctgtggggctctgaggcatgctgaaggacaaaaggttacagagatccgacttcaaaagtcagggtctgagtctggcaggtggagaggtgctaaggggctggtccaggagtcaggcatttcaggacccctccaagcttctacagtctgtctgagcatgctaccaagcccccagataccccaaaactaacagaggcagttttgtctgagcccagccgtcccacatgatgacccttaggtctaccctcctctctaaatggacatnctcgtttgtcccaagtctccagagagactactgatggctgat

SEQ ID NO: 1681 - DNA, 769 bp, Mus musculus
ctgtataatcatgtatggtttatttaatacaatgattgtaacctatagcacaataaaatatctccatactaaagagtgacatgacatatatttcctcaaaattttgtaatgagtatattcattaaaggagcatcaatgtcacttgatgttcaagtgatacctactgctttttctgataatgggaaagtcaagagaaagctactacccccaacaggaagtcaagggacgatttgggcgtttgttcttttgcagaggcagtcttaacttttcatttccttcgtgcttgagggccccatggttatggcctgcagcgctggagaaatcgagggtacaggcacacatctcggatgtgatacctgttcagaatccagctaagaaatcgttccaagcccaagccataccctccatgaggacaggtgccatattttctctgatctgtataccagtagtaaggagcggggtcaatcccttccctcttatagccttcgagaatctcctcactgtcccaggagcgcatcgagccacctacaatctcaccaacgttgggcatcaacacgtccacagattcagtaagccgaggatcctcaggacagcgctgcatatagaaagacttgatctccacaggaaagcgacacagcaggattggttcattaatggtgtctgtcatcagtctctcaggcgcttcgggaatatcatctccaaactcgtagaaagtcccgtcttctttcttggcatcatgctccttcagccactcaatagcatccgagta

SEQ ID NO: 1682 - DNA, 564 bp, Mus musculus
tcctgaaagcgcgctccatgatcaccaggtgtttccgggaccacttcttcgacaggggctactgtgaagttaccactccaacactggtgcagacgcaggtggaaggtggggccacgctcttcaagcttgactattttttggaagaagcgtttttgacccagtcctcacagttgtacctggagacctgccttccagccctgggagatgttttttgtatagcccagtcatacagggccgaacagtccaggacacgaaggcacctggctgagttcactcacgtggaagctgagtgtcctttcctgaccttcgaggacctcctgaaccgtttagaggacctagtgtgtgatgtggtggacagagtcctgaagtcaccagtggcaagcatagtgtatgagctcaacccgaactttaaaccccccaagcggcctttccgcaggatgaactactcggatgctattgagtggctgaaggagcatgatgccaagaaagaagacgggactttctacgagtttggagatgatattcccgaagcgcctgagagactgatgacagacaccattaatg

SEQ ID NO: 1683 - DNA, 15 bp, Mus musculus
aacgctttttttttt

SEQ ID NO: 1684 - DNA, 158 bp, Mus musculus
gcagcgctgagcaatgtccgctggctgacccgagcggtgctcgccgctcggaactccggggcatggagaggtctcggaacatctacggctcacgccggttgccagagccaggcacaagatgagagggttggcgtgagcctttgctgtgaccatgctgc

SEQ ID NO: 1685 - DNA, 642 bp, Mus musculus
agcttgataaatagaaataattttttttcgtttattttaccctggtgagcatatatgtattttatacaacaaagtatctcttcacttattggcaaggcgtgggtgagaatgacccaccctcacaacgactcctcacagatcacagtgcagcagtgtcgcgctcatacagactttaaaagcaacagttatcaatactcttctggcaaacaacccaggctccggaatggcaaaagcaaaagaagtttaggcaacaatcaaagcggccccggggggaatcagtctgagtcttcgtcatcgaggtagtcctcggcgttgcttaacgttcgagccccatctgttccctgctgcttcttcttcaggagcgatgcacaggcagcgttggtggccatgtccgaggccagcttcttctcattgtttctcaagtctgtcctcgcaccttttgccagtagcaactggacaatgtctgcataacccttccaggcagccgcgtgcagagctgtgtctcccagcttattctgctggttcagctccacattcggctgagtaaacagaacctccactatgtctttatgggcaccgtggcaggcccagtacagggctgtgcttccagctttgtccaggccgttcacacccacccggttg

SEQ ID NO: 1686 - DNA, 724 bp, Mus musculus
  misc_feature (1)..(724): n is a, c, g, or t
ttgacaatccatgaagctgcaaaaagaggcaacctgagctggttgagggagtgcttggacaaccgggtgggtgtgaacggcctggacaaagctggaagcacagccctgtactgggcctgccacggtggccataaagacatagtggaggttctgtttactcagccgaatgtggagctgaaccagcagaataagctgggagacacagctctgcacgcggctgcctggaagggttatgcagacattgtccagttgctactggcaaaaggtgcgaggacagacttgagaaacaatgagaagaagctggcctcggacatggccaccaacgctgcctgtgcatcgctcctgaagaagaagcagcagggaacagatggggctcgaacgttaagcaacgccgaggactacctcgatgacgaagactcagactgattccccccggggccgctttgattgttgcctaaacttcttttgcttttgccattccggagcctgngttgtttgccagaagagtattgataactgttgcttttaaagtctgtatgagcgcgacactgctgcactgtgatctgtgaggagtcgttgtgagggtgggtcattctcacccacgccttgccaataagtgaagagatactntgttgtataaaatacatatatgctcaccagggtaaaataaacgaaaaaaaattatttctatttatcaagctaaaaaaaaaaaaaaagcggccgc

SEQ ID NO: 1687 - DNA, 744 bp, Mus musculus
cttcctctggtattcctagagctgcaagagggattggttctactaaaaatgattctgattacttaataatgcctttagattgttgtcaaattttatctactcacgtaggggtaaaccctcgtggcatcaggccattagaggtctgacaaatggatgtcacgcatatttcctcctttgagagaaatcaatatttacatgtttagataaaaagagatcacctccataccttaaatgattttcaaaagctgttgggagatattaattgcctcagaccttttttaaagattccttccgctgagttaaggcctttgtttggtattttagaaggagatcctcatatctcctcccctagggctcttactctagctgctaaccaggccttacaaaaggtggaaaaagccttacagaatgcacaattacaacgtattgaggattcgcagcctttcagtttgtgtgtctttaagacagcacaattgccaaccgcagttttgtggcagaatgggccattgttgtggatccatccaaacgtatccccagctaaaataatagattggtatcctgatgcaattgcacagcttgcccttaaaggcctaaaagcagcaatcacccactttgggcgaagccatatcttttaattgtaccttataccgctgcacaggttcaaaccttggcagccacatctaatgattgggcagttttagttacctccttttcaggacaaatagataaccattatccaaaaca

SEQ ID NO: 1688 - DNA, 527 bp, Mus musculus
cgctttttttttttttttttttttacagacagaaactggtcatagctttatttagaataaaaggcctgaaacacacccagtgatctcaataggtgatgaaatgccagtcatcaggatgaaataatacacttttttttaccaaaatggaaatacaaaatactctgttggcgtaaaaagaaacattaagctttattcaaagaaatactgaaaataaatgttttacaaattgcaatcaagcaaagtgtaatttagtaatgaattctcagaatctatataatacattctggtgttggccaatgaaaagtttactttaaactagtattttacatatgcttaaccttcaatcaacttaacattcattgattataatgatttaactgttctgtagtatctcagaaataacttctaaatacaaaccattcacatcagcaaggaaactgtaaagacgcacgtaaatgactgcaggcctccatctgcaggctgtacgcagatgggtccgtttctccttagaaagttcccacacagtc

SEQ ID NO: 1689 - DNA, 381 bp, Mus musculus
cacggatgaactgtgggaatccttgtgcgctccccagagatgctttattacgtggcatcaacagccatcagtgaagagacccctggcgcgagcgcttagaaaggaccacctgctccatccacggcagatggttgccccagccgctgtgcagtcagatggaacacggtgacgagtggttcacgcgctctctatcccaagaatggcatagatggcaaacggacagtaaaggagtctggcagcactcaggacatcagtgagctcgatgcacaccagctgcatcggcacgggcacctccaacagctttctaaatcgctgccttcatggtgcgtcttgctgctccgtagatggagcctggtcaatcggggcaggcttcacaaaagg

SEQ ID NO: 1690 - DNA, 585 bp, Mus musculus
aggatggtgctggacctggatttgtttcgggtggataaaggaggggacccagccctcattcgagagacgcaggagaagcgcttcaaggacccggggctggtggaccagctggtgaaagcagacagtgagtggcgattttgcagatttcgggcagacaacttgaacaagctgaagaatttatgcagcaaaactattggggagaaaatgaagaaaaaggaagcagtgggagacgacgagtccgtcccagagaacgtgctgaatttcgatgacctcactgcagacgcgctagctgccctgaaagtctcacagattaaaaaagtccgactcctcattgatgaagccatccagaagtgtgatggggagcgggtaaagctggaagcagagcgatttgagaacctccgcgagattgggaactttctgcacccctctgtgcccattagtaatgatgaggacgcagacaacaaagtagaacgtatttggggagattgtacagtcaggaagaaatattcccatgtggacctggtggtgatggtagatggctttgaaggcgaaaagggagccgtggtggctggtagtcgggggtac

SEQ ID NO: 1691 - DNA, 629 bp, Mus musculus
aggatcgtggtgtgtatctttaattccaacatttgggaggcagaggcaggtaaatatctgtgagtttaaggtcagcctggtttacatgacaagttccaggacaaccatttctacatagtgagaccctatttcagaaaaaaaattaaggacagcaagatggcttagcaggtaaaaagaattgccacccaatgatctgagtttggtctccatacataaatgtaaaggagagagccaactccacatataatgatgatgataataataataataataccacctacaataacaagatttaagacattaggctatattcatcttatcaatatgtatttcactcctgcaggtgcaaaactttaggtattcttaatattacaatctttgtttggctttatgaaattcatagatgttggaagtggtgatggctttataattctctgtctgaattctctcttcctcagcaaagaaagagcaacaagaaagtccgagtaacagtgaagccccatttgctgtacagagtaagtgtctatgaaagaactctaagaactttgcctggtggcatgcctgccatcccaccactcaggagacagagtcagaagacagtgaggcggagggagggtaactgaggcggt

SEQ ID NO: 1692 - DNA, 585 bp, Mus musculus
ttggacttccattcacagctgcgactgaacaattgttgggaattgggctgccgactttagtctagctggtgtctggcagtatcttttttcccgcacatatgtcctgtggtgaaacgtctgcttgacgattgtgtttatttaaaaagaacagctgagggatgacgacaagcctgatgaccctaatggaatccatggaaccccagatgataaaaggttcctgcccagtctgagttcctgtcttggcttcccttagtggagtacacctgggatagatgcacacaacacacaaatctacgttctccttcacaatcggaacgcggctgaagacatccagtgctgaggtcttaccccctttaattccaatgacggtgcctcgaaggccgactggcacggagaagctctctctcacgttcacaacgcgatcaaagagccggaactcggcatcccgatcaggaatgactccatgctgctgctctaagggctgaacagaagagagccgtgtactctaaggaatgcttgacacctttcacatgttgatgtctgtgagttctctgttttcagagcggggtcttactatgtagccct

SEQ ID NO: 1693 - DNA, 653 bp, Mus musculus
ggtccacacagggaatttcacattttctggcagtgcaggggcccgtgtgggtcatgtgtggccccttccgaggcccagactctagcacacctaatcagggcctgcacaggggcagggaagccttcaaacaccagaggagtgagggagggctgcaggcgttgagggtcacatctggcttgcctcagtttccccacggggcacaggagggtgaagtctgagagtcgtgggaaagcaaacttagtccctcagaatgcctgcagtattttaaagcctagtgtactccaatacttttgaggcaaaacccccacaaaaccccttgttttctttcattgaaactgcctgtaatttccccgggttcacaaaccacaaactgatgtgaaagagatgaagaaacaggaagcccattggggccagcctctcccacagcccactgggaaacgcacagcctcactgtcccaccaaggacacccatgtcccctgtctggtgggtcaatcctgggaaggaagcgaggcatggatgggtgaggaaggagcatagatagcacagatctgtcatcccagcccttaggaagctgaggcaggaggattgcagtgagttccaggccagagagagatacaaagagatgaccagtttccaaacacaaaacacaatg

SEQ ID NO: 1694 - DNA, 548 bp, Mus musculus
aggccggccagtgcgtcatcgggctgcagatgggcaccaacaagtgtgccagccagtctggcatgacagcctatggtaccaggagacatctctatgaccccaagaaccatatcctgcctcccatggaccactgcaccatcagcctccagatgggcaccaacaagtgtgccagccaggtgggcatgacagctccagggacccggaggcacatctatgacaccaagctgggcaccgacaagtgcgacaactcttccatgtccctgcagatgggctacacgcagggcgccaaccagagcggtcaggtcttcggactggggcggcagatctacgatcccaagtattgcccacagggctctgcagctgacggggctcctgcgggtgacggccaaggcgaggccccagagtacctggcctactgccaggaggaagctggctactgagcacccagcatgccagctcccccactgcatcagcagccctgtgtgggctttggggttttcattgtgttttgtgtttggaaactggtcatctctttgtatctctctctg

SEQ ID NO: 1695 - DNA, 598 bp, Mus musculus
gtttttcttcaagagtctgtctgttttatttagacttagctaaaggtgtactctcacatgcttgaagactttgtaattattcctgatgttataatcactagtttctattctttcataaaatagaaaagaaaaatctttccagtataaatcctatattttcacttgtaaattcctcaactatccagtagaggagagcagcaaacagtgggtgggaagccgcacgctgcagttacggtcagggagcgtctgtggagtcccgggtacagactcatctgtcgtctcccctcaaaggtttcaaacagctcaagtgggaagctgagcgagatgactggccttagtttttaaaagtcaaccatttttcctcatctttctctctaactccatacattccagactgttcaatggatttgtaataaacttccaaaatgaatggaaatttcttgctcattgtttgtctgaaatcttggctggagtgcatctttttaaacagacagtaagctccagcgacacccacaagctcagctgctagcactcctttaaagatcttcctcgccagcggttccatgatccgagccatcctgaggcctcggatagtcga

SEQ ID NO: 1696 - DNA, 619 bp, Mus musculus
  misc_feature (1)..(619): n is a, c, g, or t
aggcctcaggatggctcggatcatggaaccgctggcgaggaagatctttaaaggagtgctagcagctgagcttgtgggtgtcgctggagcttactgtctgtttaaaaagatgcactccagccaagatttcagacatacaatgagcaagaaatttccattcattttggaagtttattacaaatccattgaacagtctggaatgtatggagttagagagaaagatgaggaaaaatggttgactagcaaaaactaaggccagtcatctcgctcagcttcccacttgagctgtttgaaacctttgaggggagacgacagatgagtctgtacccgggactccacagacgctccctgaccgtaactgcaggcctgcggcttcccacccactgtttgctgctctcctctactggatagttgaggaatttacaagtgaaaatataggatttatactggaaagatttttcttttctattttatgaaagaatagaaactagtgattataacatcaggaataattacaaagtcttcaagcatgtgagagtacacctttagctaagtctaaataaaacagacagactcttgaagaanaacaaaaaaaaaaaaaaaaaaaaaagcggccgcc

SEQ ID NO: 1697 - DNA, 506 bp, Mus musculus
  misc_feature (1)..(506): n is a, c, g, or t
tttttctttgcatatcaaaacggtttattaatctccactaacacaactctactatactccaangtatctcgcacatctacaaattaaaagatccataggtccacaggcacggcggatcagctgaccaaaggaatgagtgataacactcacaaaagggcggccggtaacgcacaaaggtcacttaggcgcctgggctgagccaccaagcagttcctggtgctgctgagagcaggggtgtgaccatcaaaacagtcctcagtcatactggaggagagagaagaatggtataggtcctaacctctccctagcccttcaacgaggtcagctccaccaggctcacacactccaccacttcagcccggagctggtgcagcaagtcacaggccgcaaacatggttcctcctgtggccaggaggtcatccacaatgacgactctctgcccgggttccaaggcatctttctggatttccagctcagccttcccatactccagagaataggaggct

SEQ ID NO: 1698 - DNA, 423 bp, Mus musculus
  misc_feature (1)..(423): n is a, c, g, or t
ctgagttgaaactggtggcgcggcgcatccgcagcttccccgacttcccaatcccgggcgtgctgttcagggatatctcgcccctcttgaaagacccggactccttccgagcttccatccgcctcttggccatttctttttagtccacgcacagcggcaagatcgactacatcgcaggtctagactccaggggcttcctgtttggcccttccctagctcangagctgggcgtgggctgtgtgctcatccggaaacaggggaagctgccgggccccactgtgtgagcctcctattctctggagtatgggaaggctgagctggaaatccagaaagatgccttggaacccgggcagagagtggtcattgtggatgacctnctggccacaggaggaaccatgtttgcggtctgtgacctgctgcacc

SEQ ID NO: 1699 - DNA, 362 bp, Mus musculus
atgtatatgggttttttacctgcatgtatgtttgcgcaccatgtgcaggcaatgctcctggaggccagaggatcccgagactagagttatgaactgtggtgatacccctagcagccgctcctggagtcagagagcacacatgctagcagggcactcccacagtctgcacctgacagctggctgcactcaccgttcttgcacaagtttggagtaagcaccggcattaagtgacttcctgatgaagtcgcagatgtgagaactctctcctgggcatcgggggagtccaaagacacctgggtaggaaaacgacagccatgtattactctaataatcacatgttgagtgccactgtagcaggcacc

SEQ ID NO: 1700 - DNA, 3 bp, Mus musculus
tta

SEQ ID NO: 1701 - DNA, 591 bp, Mus musculus
  misc_feature (1)..(591): n is a, c, g, or t
ctggcaatttcttgatcatttgctttttttcctgttgtcttggaaagctctggagttcacagagttgggcagagcaggcatctccatggctatgacacggctgggcggaggggacccttcacttcagccagatccacttgtcacccacctcggcattgtacccaggggcatacttgcggcctggcagctctctgaagctgttgtagatccggctaccctgatgagctccaatagtgatttctgggaggtagaccggaatggtcgtgtaattcagcacttctgtcttatcctgaaccagcatccgcagtnagtgaaaggtccagtcgtcctgtttcagccaaggccctttgttgtacttaaggtattcaatgtcctctaccaccttggttgggtcttcagcttcccaggaatcgtacaccaacacctcacacatttcactcatttaggggaggaaggttttcttgtacgcattctcgatgtcctggagataggcagaggtgaccttcatttcatgtggatctcctttcttctggatcctgctctgtacctccggcacgggcacatcgatatagatgactgcgtgtggtggca

SEQ ID NO: 1702 - DNA, 591 bp, Mus musculus
gagcgctccatctacagtgactttgtcttcctggaggcaatgtacaaccagggctatatccgaaagcagtgtgtggaccactataatgaaattaagcggctcactctcccggagtacctgccaccacacgcagtcatctatatcgatgtgcccgtgccggaggtacagagcaggatccagaagaaaggagatccacatgaaatgaaggtcacctctgcctatctccaggacatcgagaatgcgtacaagaaaaccttcctccccaaaatgagtgaaatgtgtgaggtgttggtgtacgattcctgggaagctgaagacccaaccaaggtggtagaggacattgaataccttaagtacaacaaagggccttggctgaaacaggacgactggacctttcactacctgcggatgctggttcaggataagacagaagtgctgaattacacgaccattccggtctacctcccagaaatcactattggagctcatcagggtagccggatctacaacagcttcagagagctgccaggccgcaagtatgcccctgggtacaatgccgaggtgggtgacaagtggatctggctgaagtga

SEQ ID NO: 1703 - DNA, 583 bp, Mus musculus
aaagagagaaatgatttatttggtaacgaggaataaaaagaacttctttagttcttctctcttgtggaggttggactgcagtggccagatggacggcgccacacaggaatcgctccctcagaccagatctgctgagatgcagacaccatagttgcatgtgccttctagacagaggggctggcctctgtgctctctggggtttcagtggtcgctgcagtttccttcttgtcctctggcttcatggcaggaaacagaagtacttccttgatattgttggaatcggtgagaaacatggtgagccgatcaatgcccatgccccagcccgctgtgggaggcagcccgtattccagggcagtacagaagttctcgtctatgaacatggcctcgtcatcaccggcagccttggccttggcatgctcctcaaacagctgcctctgccgcacggggtcattcagctcagtataggcattgcatatctccttcttcatgacaaacagctcaaagcgctccgtgagaccctctttggagcggtgccatttggccaaaggactcatgatctgtgggtgatcacagggatagtcga

SEQ ID NO: 1704 - DNA, 594 bp, Mus musculus
tgtgatcacccacagatcatgagtcctttggccaaatggcaccgctccaaagagggtctcacggagcgctttgagctgtttgtcatgaagaaggagatatgcaatgcctatactgagctgaatgaccccgtgcggtagaggcagctgtttgaggagcaggccaaggccaaggctgccggtgatgacgaggccatgttcatagacgagaacttctgtactgccctggaatacgggctgcctcccacagcgggctggggcatgggcattgatcggctcaccatgtttctcaccgattccaacaatatcaaggaagtacttctgtttcctgccatgaagccagaggacaagaaggaaactgcagcgaccactgaaaccccagagagcacagaggccagcccctctgtctagaaggcatcatgcaactatggtgtctgcatctcagcagatctggtctgagggagcgattcctgtgtggcgccgtccatctggccactgcagtccaacctccacaagagagaagaactaaagaagttctttttattcctcgttaccaaataaatcatttctctctttaaaaaaaaaaaaaaaaaaaag

SEQ ID NO: 1705 - DNA, 657 bp, Mus musculus
ggcaggaacagcacactttattcctgtggtcctcaggtccactgactgcaccctcatgaggcacccacacacacaatggaccctacctgtgggctcgacagcccctaccctcaccaggaggctttataaagaaactgtggcctgagtctcagcagagaggcaccgctgtctgagccatcacgcttagatggttactgaggccctcagagcatcttgggggaggggggaggcaccgactccccatccctgatgagcagctgtctggagtgctggaaggtccatcgagtgggtcagctagcccttcagaaaccagcggggaaccggaggcacttgagaggggttcccgtgatcgcctagatggctgcccatcacactcgacatcccccagtataatcgatcatcaagcagcccttcaggagaggctgaccagcaggccagctcccgagttccagtgggcaacccctttctccaaatggcactggacgtggaagaggtttaaggtcccgttgtggcagtccatcctggcccagcagatgatcatgagtgtcgtctaggacttgaggtcctggtccgacctgagtggcaatgatgtactggaccccaccagggctgggctccaccgccagcgcggccttcagctcatcagagagaagaaca

SEQ ID NO: 1706 - DNA, 596 bp, Mus musculus
ccagctagtccaccgcttcaacacccaccaggggcagacgaaggtggcatacacatttgatgctggccccaacgctgtgatcttcactctggaggacactgtggctgagtttgtggcagctgtaagacacagttttccccctgcagccaatggagacaagttcctaaaggggctgcaggtggcacctgttcttctctctgatgagctgaaggccgcgctggcggtggagcccagccctggtggggtccagtacatcattgccactcaggtcggaccaggacctcaagtcctagacgacactcatgatcatctgctgggccaggatggactgccacaacgggacctttgacctcttccacgtccagtgccatttggagaaaggggttgcccactggaactcgggagctggcctgctggtcagcctctcctgaagggctgcttgatgatcgattatactgggggatgtcgagtgtgatgggcagccatctaggcgatcacgggaacccctctcaagtgcctccggttccccgctggtttctgaagggctagctgacccactcgatggaccttccagcactccagacagctgctcatca

SEQ ID NO: 1707 - DNA, 631 bp, Mus musculus
gttttgaacagtaagaggctttttatttcctgaaactcaacaagatatggtggctaatgacccaggacacggagcccaggaaagagccagaaagaacctgtaagtgatgggtaagctggctggccccagggtgaccccggagagtctctgcgcactctgaggagggcttggttggcaagaacattctctcttctacctgggctcacctgaccttgtttctgagcccatatggctaagtccctttctgatctcccagtcaagtgaggtacaggcggctgcttaggaccgggcaccccagccaggaaacgggagccaggagccctcaggtcccttcagctgcctcagtcttaagaaggagacacctgggtcaggtgaggatgcacagctcctcagatgtcctgtgtgtgaagcaggctgcagagaccgcactcagagtctggtgggcctcacggtgggaatctgggttgagatctgggcaaagagggccctgaggtgaggagtcagggggcctccaggctcagactgaggtgtggcttagttacaggccagtccactccttctgaaacccaaaggcagctcagctcggggctcccaggcacagaaagggtctgtcatcgtcccggatagtcga

SEQ ID NO: 1708 - DNA, 603 bp, Mus musculus
ggacgatgacagaccctttctgtgcctgggagccccgagctgagctgcctttgggtttcagaaggagtggagtggcctgtaactaagccacacctcagtttgagcctggaggccccctgactcctcacctcattttcctctttgcccagatctcaacccagattcccaccgtgaggcccaccagactctgagtgcggtctctgcagcctgcttcacacacaggacatctgaggagctgtgcatcctcacctgacccaggtgtctccttcttaagactgaggcagctgaagggacctgagggctcctggctcccgtttcctggctggggtgcccggtcctaagcagccgcctgtacctcacttgactgggagatcagaaagggacttagccatatgggctcagaaacaaggtcaggtgagcccaggtagaagagagaatgttcttgccaaccaagccctcctcagagctgcgcagagactctccggggtcaccctggggccagccagcttacccatcacttacaggttctttctggctctttcctgggctccgtgtcctgggtcattagccaccatatcttgttgagtttcaggaaataaaaag

SEQ ID NO: 1709 - DNA, 560 bp, Mus musculus
aaaagttaaaaatttaatttctgaccaccattcataatttatcttcaaacccaaagggaaaccactgcaatgaggcttgcctgatagggttagtggaaagggtgcatggaagagtagagtccctgcatgatgccttctatgtggcagggatcaacggctgttcacatccttttccactccactcaccaagtgccagcaccatgagcaatcctggaatcccaaaagccaatgcatagcagtcttcgccaaaacacttcacatcccctcttagcatgggtgtgatgaacatagaaatcaagctccctgcattgatggagaggtagaagaccgagaagtatctagtccgtgcctctgcatgttcctcttcaaactggtctccgccaaaagctgccacacagggtttgatacctcctgttcccagagctatgagactcaggccaaccaatgataagattgtatgtagcatttttcctcccagtattggtatggcacccaaagacttgaatacatggccaagaacatacaccagggacagatagatgattgtcttgaattttccc

SEQ ID NO: 1710 - DNA, 591 bp, Mus musculus
ccaagccctccaaagaagtcaactccgaagctcttcggctctagctacccactcagcatcgccttcattgtggtgaacgaattctgcgagcgattttcctattatggcatgaaagctgtgttgaccttgtatttcctgtacttcctgcactggaatgaagacacgtccacatctgtctaccatgccttcagcagcctctgctatttcacccccatcttgggagcagcgattgctgactcctggctgggaaaattcaagacaatcatctatctgtccctggtgtatgttcttggccatgtattcaagtctttgggtgccataccaatactgggaggaaaaatgctacatacaatcttatcattggttggcctgagtctcatagctctgggaacaggaggtatcaaaccctgtgtggcagcttttggcggagaccagtttgaagaggaacatgcagaggcacggactagatacttctcggtcttctacctctccatcaatgcagggagcttgatttctatgttcatcacacccatgctaagaggggatgtgaagtgttttggcgaagactgctatgcattggcttttgggatt

SEQ ID NO: 1711 - DNA, 549 bp, Mus musculus
ccaaataaatctttttgtttattggtggtgcccagacctggtcattgaacagtgcaccgcgtattaacaaactggagttgtagtgtttatcatcacacagacctttattggttggggggggggagcacacaaaggacacagcctcacttccatagcttcttgatggacatgtttttctcactatccttttgcatgaccttagctactgccatctcaaagtcctcctgagtgacgtggacacgccgttcccgcaggcgtacatgccagcttctgtgcacacacccttcacttcagctcctgaagctcccggcatcaactcagcaattttcctcaggttgatccccctggtcaagttcattttccgagagtggattttcaaaatgtccagccgggcctcctcgttggggggtgggaattcaatttttctgtcaatcctcccaggacgaagcagggcagagtccaggatatcaatcctattagtagccatgataaccttgatattcttggtggcctcaaagccatccagctgattgagcagttccagcatcg

SEQ ID NO: 1712 - DNA, 580 bp, Mus musculus
gagctgcagctgttgcaggaacagggctcctacgttggagaagtcgtgagggccatggataagaaaaaagtattggtcaaggtccatcctgagggcaaatttgttgttgatgtggacaagaacattgatatcatctatgtgacgcccaattgtcgggtcgctctaagaaatgacagctacactctgcataagatcttacctaacaaggtggaccctttggtgtcactaatgatggtggagaaggtgccagactcaacctacgagatgattggcggcctggacaagcagatcaaggagattaaagaagtgatcgagctgcccgtgaagcaccccgagctctttgaagcactgggcatcgcacagccaaagggagtcctgctctacggacccccaggcactgggaagacattgttggcccgcgctgtggctcatcatacagactgtacctttattcgtgtctctggctctgaactggtacagaaattcatcggggaaggggcaagaatggtgagggagctgtttgtcatggcccgagaacatgctccatccatcatcttcatggacgagattgactctattg

SEQ ID NO: 1713 - DNA, 512 bp, Mus musculus
atctgactggttttgaaggaattaatatgttctgcatgtcttggttatagagtattggcttataacttattgggtatgattagaaatttgtaacattggtaacagaaagttagcctaaagctggtaactcagggttggagtcattataaataacatgtgatatgaggtgaaagattagaactactaacaagtagaaaacgtaaaaacaaaattctaggcctttaggccaggcttggaaatgtgacctttgtgacttaatgctccaaggtatgctaatcataaaacagatagcaacatccctccacccacccgcttcctgggttcaaagagtgttaattcaaagaatgtgctattgttaggggctcttagaaactgtcttaagagataacctgaacaatgtgactttgcacttccttgtgactcttatctgttatctttggtattttttttccaacaacaccctccccacttccttgagttgtggtttcttcctttaaatacccccttatcca

SEQ ID NO: 1714 - DNA, 585 bp, Mus musculus
gcacgcacacaagaggggatccccatacctccaagtcggttctcgggtgtgaggggtggtcgcatttcccggccaacgcaccaaatgaaagacccacaacatgaggactcccccacattctgactcaggataggtgacaccccaaaatcacccacaagaaatagtcttgatgcaaactgcaagaggatttttattcaagagtgctctcgggcccacggtcatacaccacgcaggggtagaggaccgtggcgccccgagtagctggataagggggtatttaaaggaagaaaccacaactcaaggaagtggggagggtgttgttggaaaaaaaataccaaagataacagataagagtcacaaggaagtgcaaagtcacattgttcaggttatctcttaagacagtttctaagagcccctaacaatagcacattctttgaattaacactctttgaacccaggaagcgggtgggtggagggatgttgctatctgttttatgattagcataccttggagcattaagtcacaaaggtcacatttccaagcctgggcctaaaggcctagaattttgtttttacgttttctac

SEQ ID NO: 1715 - DNA, 464 bp, Mus musculus
ctaatttttccagtatggcctggatcttacaaacagcttctttcctggcctgacggacagagcctggcccccagtttcaacagaatccagttctaaaagttcctttgtcagcatttcttccagaagccaatacgctttgtctgtcttttttcctacaaactcttctacttcttgctcaagaaactgcaccttctccagcacatgtatgatctttttaatacttggaggagtgccctcatctgaagagaaacactcttctgggagattattactcggaacttggttgctgggatgctcgctgctggcattaccatataactgaggctcagcactatactggacttgagaatccaaaaggtctgagttgtcattgttcactgctcccggagattcatactgatggacgctgcagggaaagctgtgccggctcaggccttgacccgatgggttgtaggagtacgagg

SEQ ID NO: 1716 - DNA, 562 bp, Mus musculus
ctataactccaactactggaattctgtgcgacccagggctccatacccaggctcctactctgtgaggccagagttacaaggccagagcctgaattcttatgcaaatggagcatatggaccgccttaccctcctggccctggagcaagtactgcctcctactctggggcttactatgtacctggctatacacagagcaattactccacggaagttccaaacacctaccgttcacctggtaacagcccaactccaatgtctcgttggatgtattcccagcaggactgtccaacagaagcacctcctctgaggggacaggtgccaggatatcctgcttcacagaaccctggaatgaccttgccccattatccttatggagatggcaaccgcgctgtgccgcagtcaggagggactggacgaccacaagacgatgcctgggcttccagcgcttatgggatgggagcccgttacccctggccttcagctgcaccctcagccccctcggctgggagcctgtacatgacggaaagtgcttcaccgtggccaggcaacagttctcctcag

SEQ ID NO: 1717 - DNA, 548 bp, Mus musculus
gcgaaaaatattttttaaataaatttttgttttttttttttgttttgtttttttacattctgatatacatatgtaacaaggtgtatggcactgtaaccagaatcaaatcaaaagaaagacaaataaaaggggatgaggaagaaagggggggggggagaaggagaaaggagggaggggaagccactggtactgttgaatgcctgtctccaacgccactcctcactcagctgccagctctccctcagctgcacactccaaacaccatttttattgcacgagtgccagcaaaggcacatggtagaatggtcagtttccttctgccaaacaaacagacaaacaaacaaacaaaaagttctctcagacccacagaaggggaaaagatatccggagcatagaacacacaaaaccgacactagcctgtctccccagagaaggtgtgaggcgagccgagtccactgagcttgccggccctttcttcacaccagtgagcacaactgggcacggtttggcagggtttgcttttgacatgggtgtgcagtcagttccag

SEQ ID NO: 1718 - DNA, 580 bp, Mus musculus
tggtattgaaagggggactcagtagttttaaacagaaccatggaaacctctgtgacaactccctccagctccaagagtgccgggaggtggggggtggtgcatccgcggcctcgagcatgctacctcagtctgtccccaccacccctgacatcgagaacgcagagctaacgcccatcctgcccttcctgttcctcggcaatgagcaggatgctcaggacctagacaccatgcagaggctcaacatcggctatgtcatcaacgtcaccacgcaccttcctctgtaccattatgagaaaggcctcttcaactacaagaggctgccagccacagacagcaacaaacagaacctgcggcagtactttgaagaggccttcgagttcatcgaggaagctcaccagtgtgggaagggccttctcatccactgccaggccggcgtgtcccgatccgccaccatcgtcatcgcctacttgatgaagcacacacggatgaccatgactgacgcttacaaattcgtcaaaggcaaacgaccaattatttccccgaacctcaacttcatggggcagttgctggaatttgagga

SEQ ID NO: 1719 - DNA, 508 bp, Mus musculus
gagagttatataatcactttattttccatcccccctcaaatgtaacaacattaaagccattccaacatatagctattcctatggctccttgcatagctcatatctagctgaagttagatatttcagtaacgagatgatggttatctcatcaaaatgacaacatgtctcaaaaacaggttctctattcctgtaactctcttcctacccctcaaaacttaaaaccccttcagtccaaggctaacaggaagatagcccacagccacggctaaatcattgcacccagatagcccacagccacggctaaatcattgtactcagatagcccacagccatggctaaatcattgcacccatgctcagataggggtcccagacaaccagaggggttagggttagacttctggaacaggcaacttattatttatacagaatagactatggaagaaaagccccctttgttagtgttttacctccaccctaagttactgcataccaagcggctatgaata

SEQ ID NO: 1720 - DNA, 577 bp, Mus musculus
tgccgtggtagccgacaaggataagaaaggtcctgaaaacaaagatccacaaactgaaagccaacagctagaagccaaagcagccacacctccaaatcccagcaacccagcagactcagctggcaacctggtggctccctagtgtcccctgggaccatgctgtagagacttttaagttgcatgcactgcgggacttgcagtcagctggctgccattattcatagccgcttggtatgcagtaacttggggtggaggtaaaacactaacaaagggggcttttcttccatagtctattctgtataaataataagttgcctgttccagaagtctaaccctaacccctctggttgtctgggacccctttctgtgcatgggtgcaatgatttagccatggctgtgggctatctgggtacaatgatttagccgtggctgtgggctatctgggtgcaatgatttagccgtggctgtgggctatcttcctgttagccttggactgaaggggttttaagttttgaggggtaggaagagagttacaggaatagagaacctgtttttgagacatgttgtcattttgatg

SEQ ID NO: 1721 - DNA, 652 bp, Mus musculus
  misc_feature (1)..(652): n is a, c, g, or t
aacctctcctgccacactgattaatcctctcctggaaagtcacacatatcaacaggaatgaaacaaagatgctgaacttgacagacagcaaatactcgagagggttgttaacctagataactgatcagtagtttaaagaaatcttctagacatcgtgaaaccggcctgctcatccttcactacagcatcccaggcatccagcatcccaggcatccagcatcccaggcatccagcatcccaggcatccagcatcccaggcatccagcatcccaggcatccagccctttcttctgacacagccccgaccagaaacacttgcgtcacttaactgctgctatgaaccagtttcaaaaaagaaagcagtatataaaaatatttaacagaactatgaaagatgtggggagggagtctctcttcagagccaagtcgtcttggctttgcgtggctttcctttgtctgtccttcagggcttgttcacctggcccaggaacaagatggcacctgtgggattgtgtcggatggaaaacaggaaagggctgtctactantaaccagggaggtgatgacttgcaattaggattgcagttgttgctgccgagctttggttcatcttcactgactgcaatgtttgctttttgcagatgtgagagaca

SEQ ID NO: 1722 - DNA, 576 bp, Mus musculus
tggaagtgccttttgcagtaaggaacaaagatgtgtttcagtgtgaagtgcagaatgtgaacttccaggacccagcctctgcctctgagtccatcaatttttgggtcaaaaatgagaccaggggcatgattgataatctgctttccccaaatctgatcgatggtgcccttaccaggctggtcctcgttaatgcagtgtatttcaagggtttgtggaagtctcggtttcaaccagagagcacaaagaaacggacattcgtggcaggtgatgggaaatcctaccaagtacccatgttggctcagctctctgtgttccgctcagggtctaccaggaccccgaatggcttatggtacaacttcattgagctgccctaccatggtgagagcatcagcatgctgatcgccctgccaacagagagctccaccccactgtctgccatcatccctcacatcactaccaagaccattgatagctggatgaacaccatggtacccaagaggatgcagctggtcctacccaagttcacagctgtggcacaaacagatctgaaggagccactgaaagcccttggcatta

SEQ ID NO: 1723 - DNA, 475 bp, Mus musculus
gtctttgccgctgtcatcttcctcatcggatcccacatcttcaatcttaggcttctcctcatcctccttatcttcctcctctttctcacctttctcttcctctgcctcatcatcactgatctccttctcccgttccttcttgtcctcagccagctcggagaagagctccaggcacttcttgacgatgttcttgcggatgaccttcaggatcttgctctgctgcagcatctcccgggagatgttcaggggcaggtcctcggagtcaaccacaccgcggataaagttgaggtactcaggtatcagctcgtcacagctgtgcttcgtgatcacaaccactttctctgcaactagataggccgagtagaatccgacaccaaactgcccgatcatggagatgtctgcaccagcctggagagcctccatgaacgccttcgtgccagacttagcaatggttcccaggttattaatgaggtca

SEQ ID NO: 1724 - DNA, 573 bp, Mus musculus
ccccgcgcagcctaggcttgccgtgcgagtcggacttggtccgggcccaccaccctgctctgtactactactcggctttcccgtcaagatgcctgaggaagtgcaccatggagaggaggaggtggagacctttgcctttcaggcagaaattgcccagctcatgtccctcatcatcaacactttctattcaaacaaggagattttcctccgcgagttgatctctaatgcttcagatgccctggacaagattcgatatgagagcctgacggacccttctaagttggacagtgggaaagagctgaaaattgacatcatccccaaccctcaggagcgcacgctgactttggtggacacaggcattggcatgaccaaggctgacctcattaataacctgggaaccattgctaagtctggcacgaaggcgttcatggaggctctccaggctggtgcagacatctccatgatcgggcagtttggtgtcggattctactcggcctatctagttgcagagaaagtggttgtgatcacgaagcacagctgtgacgagctgatacctgagtacctcaactttat

SEQ ID NO: 1725 - DNA, 800 bp, Mus musculus
  misc_feature (1)..(800): n is a, c, g, or t
atgactcaactactaaatccacaagcaacggttcagacacggtgcttctgaagtgttctcacccctcccaaacaggcgcaactgcatcgaggagagggtggacttccccacctctgctcaggcatcagaaggtagatgggggtcattactgctgagcgccacagcagctggaacaggtatcccaagtgagttggcagcggcaatcactggtgagcctgccagaggtccaaggggtgaaggagttggcactgaagaaatccctgacatcatattggcgctgctgacaggtgtgctgccccctgccatgctagtggaactcattcgagcctggtccttcacaacagtgtagaagtaagggtgctccatggcctctcttgcagtgagccgtgactggtggtcatatcgaagcagcttgtccagaaaatccaaggcctcagggctgacaagatgctggttttcactgtggacaaagcgttcccatcgcttacgggagtgtctgcccaagatatcgttgaaacgtggatctaattcaatgttgtacttgtcaatatagtcatataaatcttctgttcccagaaccttggctatcctcaccaactgatcataattgtcatgtccatggaaaaatggctccttccggaagatcatactggccagcatacaacccaagctccacatatccaaactataatcgtacatctgataatctacaagtagctctggacctttgaaatatcgagaagcactcggacattatactcttggcctggatggttaaactcagctanaccccagtctat

SEQ ID NO: 1726 - DNA, 679 bp, Mus musculus
caaatacagtgaagtgtttgaagccatcaacatcacaaataatgaaaaagttgttgttaaaattctcaagccagtaaaaaagaagaaaattaagcgtgaaataaagattttggagaatttgagaggtgggcccaacatcatcacacttgcagacattgtaaaagaccctgtgtcacgaacccctgccttggtttttgaacatgtaaacaacacagacttcaagcaattgtaccagacgttaacagactatgacattcgattttacatgtatgaaattctgaaagccctggattattgtcacagcatggggattatgcacagagatgtgaaaccccataatgtcatgattgatcatgagcacagaaagcttcggctaatagactggggtttagctgagttttaccatccaggccaagagtataatgtccgagttgcttctcgatatttcaaaggtccagagctacttgtagattatcagatgtacgattatagtttggatatgtggagcttgggttgtatgctggccagtatgatcttccggaaggagccatttttccatggacatgacaattatgatcagttggtgaggatagccaaggttctgggaacagaagatttatatgactatattgacaagtacaacattgaattagatccacgtttcaacgatatcttgggc

SEQ ID NO: 1727 - DNA, 705 bp, Mus musculus
aagacgacaagaatatataatcaccaggccctagtgacaacctcacagacacgtcatgttcaatatgatgcccaaagccgaggcttaggcttgagtagctaggagatgaccacctttcccaagccacagggagaggcgtaggcaatgagggaaagatcatgaatcttattttaggggaactaacgttgagtgtttatgtcgagagggggacctggaaattacaagcaggtaagcaatagctaaacccaaacaagaagtgaagagggccaaaggcagagctctggggacatcaaagcttaagctacataaaggaggctcagaagtggcaggagagagatctatccaggtctcacaggcccctaggatgccattctatacacacaagacccggtgtagctttgctctaacttcttaaagcatcatttaaaatcatctactttaatatacaggaaacacataaaacattttaaaagaacgatgtccaagtaccagagttggtgcctgagaggaatcagaacagggctttctttggtgcccttggggatgactccagcacagccctagctctccaacaaggcaaaatgctgattttccttgtcgtggtcctggtttggctcccgtgctcctcctccagctttgagaaatcttccagttccaagaacgactccttcctttaagtccttaatcgactatccggatagtcga

SEQ ID NO: 1728 - DNA, 20 bp, Artificial Sequence
  There is no sequence available for this end of this clone.  This is a place holder.
  misc_feature (1)..(20): n is unknown
nnnnnnnnnnnnnnnnnnnn

SEQ ID NO: 1729 - DNA, 787 bp, Mus musculus
gaacttgcacacgtttattaggctatgcgcccggggaatcttagcactcttgaaacatgcacttgtttcagtttccagggagggagatgagactcttgcagtcaccacagtggcagtggacagtggctacactgtcaacagaagcagtgccaggtgaccgctccagctcactcacactcccgtagccatggactcgggaaaagagtaggtaccatcgtgttttgtgtttgatgcaggtgagcacatgatcccaagctgtgcgctcagcctaattcttttacaaattacatttcataaactcacaatactcacttaagtgatagctatatccataagactgtaaacatctcagtcaccactggtagcacatgaggagacacaccacaatgttgtaggaagttgttttgggcaataagtgtagaatttgtgtgcgactcataaaataaaactgtgaactcattcctgggatgtcccagtagacagatattccatattgataaattgaccccaggatcagtcactatacttgtatatgaaaatagaaatctcagtaagaatttcgagtctatcctccaaggaacacaatgttgtatgtctgtgatgctaactagcgcccaggaaacgggagcgggaggcacactggaagccagtttggcctacatagggcaagcgagaaataagataaaataagataaaacacaggcaagagagaaatcacagtttgtgcccagacaaacgtggcttctgtccccatcgtccccaccgcagttctcggaggctgcacatc

SEQ ID NO: 1730 - DNA, 20 bp, Artificial Sequence
  There is no sequence for this end of this clone.  This is a place holder.
  misc_feature (1)..(20): n is unknown
nnnnnnnnnnnnnnnnnnnn

SEQ ID NO: 1731 - DNA, 347 bp, Mus musculus
aatataagatttattttatgtatgagtacactgcagttatcttcacatactaggagagggtatcctatcccattacagatggttgtgagccactatgtggttgttgggagtttaactcaggacttctgaaagagcagtctaaccactgagttatctctccagccccagctgattcttttcagtcacacccattactgatattttgtatgtttgaaagacaagacctcactatgtagctcacagctcaagctggccttgaattcaccatcctttgagtaccagaatatagatacatatgaccacacgaggctctactgcttctgaaactttttgcatgtgcatttttg

SEQ ID NO: 1732 - DNA, 579 bp, Mus musculus
gggtggcctatacatttagtgccagcaattgattggctgaggtgggaggctagctatgagttcaaggccagcctggaataaatagtgagttccatgacaggctgagctagagtgaggttctgtctccacaaaaccctttaaaaacaaagatgttcttagtccgattacctttctgcctgggccagtggatgtaacataagtgaaaataactctgaaagtgaacattagaaatacttgctgacttaaactttattatatatggtatcctcaagggtttgcctgtatttccttatggtaggatggaagtatatccaagaggtcccagaatgggttctgagaatgagtaagaccaaagcatttcctctgctctgattattttttcctagtgggacaatagatgactgtgagctggtggaaggcctcgttctcacacagaaagtagcaaattctggcataacaagagttgaaaaggctaagattgggcttattcagttttgcttatctgctcctaaaacagatgtaagtaaaatccaagctggtttcctacttattaactttctagtaagatctgttttttta

SEQ ID NO: 1733 - DNA, 776 bp, Mus musculus
ctcttccttctcctgtgctttcgctttccctccccgctgcccaccccaggttcctcgtgcggcgctcaccaccaccccccggctctggccatggccacactgagggtccatcccgaagcccaagccaaggtggatgtgttccgtgaagacctgtgtagcaagacagagaacctgcttgggagctattttcccaagaaaatctcagagttggatgcgttcttaaaggagccagctctcaatgaagccaacctgagcaatctgaaggctccattggacatcccagtacccgatccagtcaaagagaaagagaaggaggagcggaagaagcaacaggagaaggaagagaaggaagagaagaagaaaggggacgaagacgacaaaggtcccccctgtggcccagtgaactgcaatgagaagattgtggtcctcctgcaacgcctaaaacctgagatcaaggatgtcactgagcaactcaatctggtcactacctggttgcagctacagatacctcggatagaggatgggaataattttggcgtggctgtccaggaaaaggtgtttgagctgatgaccaaccttcacaccaagctggaaggcttccacacgcagatctccaagtacttctccgagaggggtgacgccgtggccaaagcagccaagcagccccacgtgggtgactatcggcagctggtgcacgagctggacgaggcggagtaccaggagatccgtctgatggtcatggagatcgagatgcttatgctgtgttatatgacatc

SEQ ID NO: 1734 - DNA, 574 bp, Mus musculus
gccgctttttttttttttttggtgggcaactatgtatttattgtgtttgggaggcagagtgagggagaaaccccagccagtaggaagaagactgcgtccagtctagagttcctggtgaaaagcaggaaggtttctgctatacccatcacagaatgagagagggggctcaatagatcattcccttggtttctccacggggcttcttgagcttctcaaagttcttcaggatgatgtcatataacacagcataagcatttcggatctccatgaccatcagacggatctcctggtactccgcctcgtccagctcgtgcaccagctgccgatagtcacccacgtggggctgcttggctgctttggccacggcgtcacccctctcggagaagtacttggagatctgcgtgtggaagccttccagcttggtgtgaaggttggtcatcagctcaaacaccttttcctggacagccacgccaaaattattcccatcctctatccgaggtatctgtagctgcaaccaggtagtgaccagattgagttgctcagtgacatccttgatctcaggttttaggcgttg

SEQ ID NO: 1735 - DNA, 655 bp, Mus musculus
ggagttaagaattctttactaggtattagttcaggcagatgccctggttctgcgatcccctctccctataggtcacagttgagcgggtttcttcagaagagcctgtggggctgagagtgctgaaccccagggtcagaagcagaactggaaagcctccaatacatgctgcttccatgtttccaggctgggcagcagggaggacaggcccatgacgtgccagggctctccgtcagacaccatggaggtttggtaggacagcagctgtacacccgcctctgccaggaggccaatcatagtgggcagcatcccagggtcggagggctgagcccggaatacgagcaggggttggcccctgcgtagtggcacctctggtctgaagacagctccgttgagcatctgcagcattggtgtggtgccctggaccaagcccacggcttgtaagggagcacctgccagggccacagtcaggaggcattccccgctaccctgctcccctggaaccccagggttgtgggaggtggtgacattgaggccagcctctttcaccagtagcttagcgttcaccaagttcacgtctgcctgcttagatgcttctctcagaaggccgacaatgactgcagggctcaggcaggtcccagcattcttcagagatgtt

SEQ ID NO: 1736 - DNA, 576 bp, Mus musculus
cccacccacagcaactgattctaaggcctgactctagcaatggccttcgcaaatctgcgcaaagtactcatcagtgacagcctggacccctgctgccggaagatcctgcaagatggagggctgcaggtggtggagaagcagaacttgagcaaggaggagctgatagctgaactccaggactgtgaaggcctcattgtccggtctgctactaaggtcactgctgatgtcatcaatgcagcagagaagctccaggtggtgggcagggctggcacaggtgtggacaatgtggatctggaggctgccacgaggaagggcatcctaatcatgaacacccccaacgggaacagcctcagtgctgcggagctcacctgtgggatgatcatgtgcctggccaggcagattccccaggcaacagcttcgatgaaagatggcaaatgggaccggaagaagttcatggggacagaactgaacgggaagacactgggaattcttggcctcggcagaattggaagagaggtggccacccgaatgcaatcctttggaatgaagactgtaggctatgaccccatcatctct

SEQ ID NO: 1737 - DNA, 544 bp, Mus musculus
agccgagttttgatggttttattcactgatcataggagggtcacatgaacatcaaggtgaccgtgactgaggtcctagcacctctttatctgtaagagcattcacatctatcattttggtctggatgggaaccaaagttagaggttcaaaggtcaggcttcctcggttgttgaaattatacttggtttttgctgggaccaccagaacaacattctcaatgcggatcccaaacgccccgtcttcgtaataccctggctcatcagtgacgatcatgcccgcttccaagggctcatcggagaatgttttataactgatgccacagggcccctcgtgaacattcaaaaaggacccaacgccatgtcctgttccatgcaggtaatccagaccagaatcccacaaggctgaccgggcaaaggagtccagaaggtggcctttggttcccgtcgggaaaacagctgcgctcacagctatgtggcctttcagtacgtatgtgaagcattccttctcataggcagtgggggtcccaaagtgcatggtccgggtg

SEQ ID NO: 1738 - DNA, 607 bp, Mus musculus
ggcgtgaagcagcacctgctgcttgacttgggcctggaggcggaatacagaatccaggtcctgccatacaagtccatcctgagtgagctcaaggccctgtgtgctgacctgtccccgagggagaaagtgtgggtcagtgacaaggccagctacgctgtgagcgaggccatccccaaggatcaccgctgctgtatgccttacacacccatctgcattgccaaagccgtgaagaactccgctgagtcggacggcatgaggcgggctcacattaaagatgccgttgccctctgcgaactcttcaactggctggagcaagaggttcccaaaggtggcgttacggagatctctgcggctgacaaggccgaagaatttcgaaggcagcaggctgactttgtggatctgagcttcccaacgatttccagcacgggacccaacggcgccatcatccactacgcgccagtccctgagacgaacaggaccctgtccctggacgaggtttacctcattgactccggtgctcagtacaaggatggaaccacggacgtcacccggaccatgcactttgggacccccactgcctatgagaaggaatgcttcacatacgtac

SEQ ID NO: 1739 - DNA, 879 bp, Mus musculus
gggccagaaacaaacttttattgcaaaacgggaaccttcaagtcacaaagaggtcagctatggcttctgtcctgataaggagggctggaaacactaacagcactcccctgcatcatccctgtgaggccagttagtccttccaggaggaggatacatttccagcactctcatgaggacttgcaggcagctcagagatcagaatgcgtttgagagcaggcccctgataacatgactgggaaaccctttttctttgggtcgctggtcctcatttgtagaaggtctgtgtgcacaatcacagaccaggaaacctttatatttgggaacatttgttggaaggagcgtgctggaggggcatgggtgtggacgtgactggggaatagtatgtcgtcacggtgtgcctcagtgggaagaagtttggaagggccaagatcttgtcacatacggtttggctgtgtggattactggctggtggccgttgatagagccactcatgagcctggatggtggtgaggtcatccatgggagtagacagaacatcgttctggctgtgacatgaccccagctggggcttgctgttttctatggcggggatccagcaacagcggtgctgagcgtgttagacagagttaagagtcctgaatacggttgggttgtttgtgtgtttgtgtaggcagtcgctggattagagttgtgagcatacagagtcgtgtggtggacagcggggtatctagctatatgcttgcaattccagatggcctatattacatgatgtaggctgaaactaatgcagctcatggtggcgcatacctgtaattccagcgagcaggacaccgagggcggaggatcacaagtttgaattcggcttgtgtcaccacataa

SEQ ID NO: 1740 - DNA, 602 bp, Mus musculus
gccctactccttaggtaagcgagtctgcctgggagaaggcctggctcgggcggagttgtggcttttcttcacttccatcttgcaagccttctccctggagaccccgtgcccgccgggtgacctgagcctgaagccagccatcagtggacttttcaacatccccccggacttccagctgcgggtctggcccactggcgaccagtccagatgaaggaaggagtttggaaggtgggagccctctgggctgaaagagccttactcagggtgtgtgtgaagcaggtgtctcagaagcaacatcacactacacaccacgtatcaaggcagctgtggagaccagggaccacaccactacacaaccgcacagcaactgatgcataggcttctttttggagagggctgtctgaaacggggatcttgttatgtggtgacacaagccgaactcaaacttgtgatcctcccgcctcggtgtcctgctcgctggaattacaggtatgcgccaccatgagctgcataggctttcagcctacatcatgtaatataggccatctggaattgcaagcatatagctagataccccgctgtccaccacacgactctgtatg

SEQ ID NO: 1741 - DNA, 536 bp, Mus musculus
tttttcctcaatacccatagaacccacaggccggactaattcgaacccaagagataccctatggaaatgccctacccctccacaacagagccactctcgctcccagaacaaaatgcccctcagaccagctacagggcagacaccaaaggacaagacagaaaaccaaccagccgaaagacccacagctatgatgtagaaattcgagggtttgcagtcagcagcagccagggttcggatcggaggctccacattctaaggggcaactgctggttcttttggaggagcaagaaaacgatccatctcttctcttgtcctctttgatcttgccgaatctcaaagccgcctgacaggcaggccgggcaagcaatgtcatcactcttcagccctctgggcctccacacgcgtggctaagtacgtgcccgctagcacagatcccacgatggtcaggcccttgccagccttcagctgagaggtgaaggacagcaggcgggggtgctttacacactgctccgagtccaggttcagcatcacggata

SEQ ID NO: 1742 - DNA, 549 bp, Mus musculus
  misc_feature (1)..(549): n is g, c, a or t
tgatgctgaacctggactcggagcagtgtgtaaagcacccccgcctgctgtccttcacctctcagctgaaggctggcaagggcctgaccatcgtgggatctgtgctagagggcacctacttagacaagcatgtggaggcccagagggctgaagagtgatgacattacttgcccggcctgcctgtcaggcagctttgagattcggcaagatcaaagaggacaagagaagagatggatcgttttcttgctcctccaaaagaaccagcagttgccccttagaatgtggagcctccgatccgaaccctggctgctgctgactgcaaacccacgaatttaaacatcatagctctagtccttacggatgggtggttttctgtcttgtcctttggtgtctgacctgtagctggtctgaggggcattttgttatgggagagagagtggctctgtcttggaggtgctcttgtttttatctgtgatatttcttgggtacaaaaaaggccagcatctgctttaaaaaaaaaaaaaaaaaaaaaaaaaaaaagcggccgcn

SEQ ID NO: 1743 - DNA, 902 bp, Mus musculus
gagaaaattaaataactttttattttcaattatttggtgaagtaaagaaccaagcggacttgatataagaatgcatgcatgctatgtgtatatactacagtgaatccagtcatctgcctgtgagcactggggttgcttcctctttcactgtcacttccactggatatgcatataagagttaaaaagccctctttacagataaataaggtagaaggacaaaacaagtcatgacaatcacagatttaggattgtcaggtttcataaaacatcaaaggaaaagacaccgttttttcttcagattcccagcagcactgttagcagggaatccatttggtcaagacccactccccatcagtttccctctcagacaccacgcaatatttttccattgatgaagctactcgacagaagcctttctataacacattggtcagtgtccccgctgctgcctgaattgtaaaagctgcaatagaaatatgtttcttcacttctgcccaggccaaggaagggtctgccttattttcaatatcaaacatggcatcataaatcccagggaatgattctctggcatatttgttgtggctgcttggagcaaagatgatgtgcctgtagaacttcctcccaggtaaaccaagaggatctatgaatgctctttcaagaagcatctgctggtcattcataattctcactgcaataggattattaagatcaacttgtgtaagtcttctgtgaaaatctgaagcagcctccgaaaagtttttcacagcagaaaataagggatcaaatgacactgcatgggttctcaattgctggtcgtgtttcttggatatgttaaaatacttgctgcatagtttttcaagggctttgcatagtcttgaatgttgaaaggaatgaccacagag

SEQ ID NO: 1744 - DNA, 597 bp, Mus musculus
gagaatgcaaagctcctacaggagagaagcattgcttacatcgactcagattctgctatagaaggtaattacactcttcgagttgattgtactcctcttctaaaccagctggtttacaaaggggcaagagagatctccagtcctgatgatggttttgaaagtaaatcactttatgaaagctggctggaaaaagacccttcacctgaaaataaagagtgtcctagaatcaataagcttggatctgggagtgattttgaggcttacttccaaagacttggaattgcttcaggcagagctcgctacactaagaacaagaaaacagataaatacagtagctatcctgtatatcataccatctatgagacgtttgaattagtacagaacttttatgaccccacatttaaaaagcaactgtctgtggctcagttacgaggagcattggtatatgagcttgcagactctgtggtcattcctttcaacattcaagactatgcaaaagccttgaaaaactatgcagcaagtattttcaacatatccaagaaacacgaccagcaattgagaaaccatgcagtgtcatttgatcccttattttctgct

SEQ ID NO: 1745 - DNA, 7 bp, Mus musculus
gcggccg

SEQ ID NO: 1746 - DNA, 567 bp, Mus musculus
ccagactcaaggacgaaccctcccgctcctttcccaaagacaaaagctccataactgactcactgaaggaagattggaggcatggtgctgaatatgcagctgaaggcctgggaaggacgcatgatagcttcccgcatcaccaagacctacttgcttcactattcatgcatgcctatattctgaccatgttttgtgaatctcgggcgtgaaggatggcgatgctctgtacactgctgcaggccacctaggttacctgtccgcatccctgtctattctggtacacctgactgcccacaacctgctctctaatccagcctgctctaaactgctgagccactgcctgctggccaccttgcctatgcaccaccctgcctatttctcctacgactagcatgcctgtatggacgactctttgcctctgtgagcacgtgctcacctccacgatccttgagatgccttctgctatacttgccttctgtccatgcccttcttatctacattgcacctatacctgttggactttgtataatgcctgactggcaagagcattaaatcagagatgttaat

SEQ ID NO: 1747 - DNA, 344 bp, Mus musculus
gtagctaggtataattttattatatataaaatgtgatcttcggagcccagaattgatgcagcggttagagggacttgccctccgcaggttcactgactcctcctctacccacatgcactcagaacctaggctaggaaagcaaggaggagatcagggcaagagcttcacactcttgccggtccagtcattcattctgtgacctcgggggtcacatataaggtcagtgtctctgatccgcgccggatccgcactgccagctgtgattgggttcgaacagcttcataaacatcttcagcattttgtgccaatttctccccaatggccaagattacaccaccaggccg

SEQ ID NO: 1748 - DNA, 591 bp, Mus musculus
ccacttctccccggagccagtacaatttcatcgcagatgtggtggagaagacagcccctgctgtggtctatattgagatcctagaccggcaccctttctccggccgtgaagtccccatctcaaacggatcaggattcgtagtggcttcagatgggctcatcgttaccaacgcccacgtggtggctgatcggcgccgagtacgagtgaggctgcctagcggggatacttatgaggccatggtcacagctgtggatcccgtagcagacattgccacactgaggattcaaaccaaggagcctcttcccacactgcccctcggccgctctgctgatgtccggcaaggggagtttgttgttgccatgggaagcccctttgcactgcagaacacgatcacatctggtattgtcagctctgctcagcgcccagccagggacctgggactccctcaaaacaacgtggaatacattcagaccgatgcagctattgattttggaaattctggtggtcccctggttaacctggatggggaggtgattggagtgaacaccatgaaggtgacagctggaatctcctttgccatcccttctgatc

SEQ ID NO: 1749 - DNA, 323 bp, Mus musculus
actgtgaactctgacccactcttcagtcatttattttacatcggttagtgttcctgtacaactccatatttcactccttaagagctaatcactccctgggaaacaaatacaaggtagccctccaccaggtcttagcggcggatcccgtgcactgcaatccccacccaggaaggtgtggtagtcggtctgatcaggctgcccaagccagcagccctaccagcaacaggagctctcggatttccgcacttttctggctcgagaggccatgattctgcagcagagcccgggacacagagttctgatgtagacagccatggatggca

SEQ ID NO: 1750 - DNA, 527 bp, Mus musculus
cgaggcgggagcatgaagttgattgaccatgatctctccgtcctttaggaaaggtatgctgaaggacagggtcatggacttggcctcccagacgaccatcctgcccctgctgtttggctgcctggggattttcagcctcttcaggctgctgcagaggatccgctcaaaggcttacctgaggaatgctgtggtggtagtcacgggcgccacctcaggtctcggcagagaatgtgccaaagtcttccatgctgcgggggctaaactgggcctctgtggacgaaatgtgaaggccctggaggagctcagccgggaacttgctggttcttctcagggacagacacaccaacccttcgtggtgacctttgacctcgcggatcctggtactattgctgctgcagcagctgagatcctacagcgctttggctatgtggacgatctcatcagtaatgctgggattagctaccgtggtaccattagtgataccatagtggacgtggaccggaaggagatggaaataaactactttg

SEQ ID NO: 1751 - DNA, 669 bp, Mus musculus
aaaaagcaaaaatggtatctattcagcttttaggaaattaaataacaaaacccagaataaggcaaaacaaaaaccataacatgtcatatgactgatcatgtccaaatacaacagcacttattaatgaatataaaaataaaattcatctttcatatttgctcttttcccggcttttatgacatggatgtctttagaagcttgagctatccagcccctaccatgtgactgagattacagtcccacagggaaataagtttctattctcggaggccccacacaactagttccctcacaactcttgcactggcactttcatgaggaaaacaggcactgtctgtcagagcacaagccaccctggctctgctaactcttcaagtcttctaagctctccacaggacaacagttctaagccatcagtgatcctggcagccactgccccatcatcttcagtagcagcctcccacactgcactgaaactggaaactgtaggtgctccagggagctggagggcaggtggtatgggaagataaggagcattagctgctaactcaactcagtgaacaccttcaagcagtagccaagtgtgctgcctgtacttacccaccaatatataacaaacctggaacaaatgagcaggccacattgaaccaagcctctcaaaacagaggc

SEQ ID NO: 1752 - DNA, 468 bp, Mus musculus
gggggatccagatgagttcccacttgctcacctcctgcagccattccggctgtattacctccaggctgagcactccttgcccgcgctcattcagataagggatgattgggatcagtacctggtaccatctgatcatccgaaaggcaactcggctccccaaggatgggtccttcctccgctccccagcaacgacatctgggcaacggccattcagctgcattaagatgctccaggagtgtggcccagctggcaagcactgcaggtctagatattagagatgcggttgactcacgctcgtagccttctacacaacttaactctgtgcggcattgtcctagctggaaagcctttctcttttggtctctgccctaggcaggggtacctctggagccagaggctcataagggtcttctggaaaggatctacatgaactgagggtattagcatgggctgcagccttggctctct

SEQ ID NO: 1753 - DNA, 793 bp, Mus musculus
aaaataatttatttttaattttcaataaattcttgcaacatagtcatatccccaatgataaatcaactgttcagagttagcaagaaattaggtttataaaatttttataagaaaaaatgtatccattatgcagcacttaagaataaagctgtctaaagagctcaaatgtgacacacctgtggcaagttttaaaagaacatcaatcaaaacacagtatcaatatatgcctattctataacctcaaaatcttaatatatgcctattctgggacatcagtctagtcactgtatgtttcctcagccctactccttcccacttccacctctaaaataagccctgatcatagaacagcgagcccgttacgggactcttgattatcacccattcaaattctggttgttgctggccatgtggtacatcctttaatcccagtacctgggagtcagaggaaggtggatctctgggttttgaggctagcctagtctacaaattgagttctagaatagccagagctacacagagaaagaaacacgcccccactcttccctagattttcttttgttgttgttgtcttaaaaaggggtgctaatgctactaaattatctaactcaagccagaccccctacaacaagaggatccagggccagccatggtagagtcaaaggttttctcaactttttaaagtagaactcactcacacattatgactaaccatctttttcactaggactataaacagattttgctgaatagctaatcagttaccattactaccaaaagtaacagttacctt

SEQ ID NO: 1754 - DNA, 602 bp, Mus musculus
  misc_feature (1)..(602): n is g, c, a or t
ctgtgttctaggtcagatcagacattctgtcacaatgcctgaaataaataccggccatcttgatgaaaaacaggttcagcttctagcggagatgtgtattcttattgatgaaaatgacaataaaattggggctgacaccaagaaaaactgtcaccttaatgaaaacatcgacaaaggattattacatcgagcttttagtgtcttcttgtttaatactgaaaataagctcctgttacagcagagatcagatgctaaaattacctttccaggttgtttcaccaatagttgctgtagtcatccattaagtaacccaggcgagctggaagagaacaacgccattggtgtgaagcgagcagcaaagcggcgcttgaaagccgagttgggaatacccttggaagaggttgatctaaatgaaatggattatctaacaagaatttactacaaggcccaatctgatgacaggatgattaatctcaggaaccctgtataaccaatactggatgctcaagtcgatagaaggtatcgtatttgcatattactgactacacttcacctcgtctctggcgtggccatgacactcaanccagcgtaaatgctcctgt

SEQ ID NO: 1755 - DNA, 716 bp, Mus musculus
gataaatacatatagttttaatgatcagtattgaatggtagatgaaaacatgcattagtcagactaaaaatgccacacaattcttcatatatccattcactataaaattttctgttttgaaatgtaaagttttggttcttattttagaatacacaataatcaggaggatacatgatggggagccagttttcagtaaaagatgcacagtgggtccatccaagtaatttcatgagttgaatacaatttttccagttttcttttgttggtttttcttctacgagcttggttgcaaacttaaggcctctcccatacatcttatttactaatgcatgcttgtatgcaaatatcaaaaccttagtgtcaaaaagatctgtccactttgtagtttcccaataggtttccgatagagattccatggtactttctccttcttcttcctttgcttcagcatctccagctgctgccccgtcgcgaggctgtgtatgaagaaggtgatctgccagggcacatcctttcctgcagagggcatctatcagggtggatttctgcttgtccatatcattttttatagtagctgcatcaggcctggggtcagtcttcattgcaatgtaaactgcaagagcggtttgatcgatgtgagaaataacagcattggcagcatcaacaatttcattaagtcttttcattcgttccttttcagcatccagttgatgaag

SEQ ID NO: 1756 - DNA, 622 bp, Mus musculus
tgcagtacagcttgtgaagcagagagcatatcgaagtcatgaattttataagttttgctcccttccagaaaaaggaacacttattgaagcttttcctgttttgggcggaaaagcaattgaattttgtattgctcgttggtgggcaagtcttagtgatgtcaatattgattataccatatcattccatgggatagtgtgtactgcaccacagttaaacattcatgcatctgaaggaatcaatcgttttgatgttcagtcctctttaaagtatgaagatctggctccttgcataactttgaagagctgggtgcaaacgctacgcccagtaaatgcaaaaaccagacctttaggatcaagagatgttttgccaaataatcgccagctttatgagatggtccttacatacagctttcatcagcccaagagcggagaagtaacacctagttgtccactcctttgtgaattgttatatgagtcagaatttgacagtcagttgtggattattttcgaccagaacaaaagacagatgggctcaggcgatgcctatccacatcagtattctctgaaattggagaaaggagattatacaattcgattacagattcgtcatgagcaaatcagt

SEQ ID NO: 1757 - DNA, 702 bp, Mus musculus
gcaacataatgcggagtctttactaggacagggagagaggcaggtccagggcaagtagactaggccactgttaaatatgcagaagtcctgggggtcttgactcatccgctggggatggggagttaatgtttgctgtggacaagaggtggagggattcgaatatcctgtcctctctccagacgccgttcacagtcaatcaaatagttcaccccatcgatgacgagctgcaccagctccacctctgacttgccaagtcgatccaaattagagatgtcaaagacgctgcctgtggccatgtgtccactcctccagttccacgcttttgcagtcttaggttctccaggatctttgggaagcggttatctttgctcagcagtggcagtttgatgtggactcctgcccgaagtccagtgcccaggttagatggacaggtcaagatgtagcctaaacgctcattccacacgaactcccagcctcgttcctggatcagcttctccacctctttgaggccccggcagaatctttcaaacactctcttcatgttgccgcctttctccatagagatgacccgtgtgtggtcctcctcattcacccagatcaagaaactcttctcattgttgtgccagatccctcgagcatcaggccagtctcgagccattcctgctgcagtcagcaatgggggacacaggttttatcaaacag

SEQ ID NO: 1758 - DNA, 795 bp, Mus musculus
  misc_feature (1)..(795): n is g, c, a or t
gacggtactataggctcagtgagatgacggaggccgaacagcagcagcttattgatgaccattttctgtttgataaacctgtgtccccattgctgactgcagcaggaatggctcgagactggcctgatgctcgagggatctggcacaacaatgagaagagtttcttgatctgggtgaatgaggaggaccacacacgggtcatctctatggagaaaggcggcaacatgaagagagtgtttgaaagattctgccggggcctcaaagaggtggagaagctgatccaggaacgaggctgggagttcgtgtggaatgagcgtttaggctacatcttgacctgtccatctaacctgggcactggacttcgggcaggagtccacatcaaactgccactgctgagcaaagataaccgcttcccaaagatcctggagaacctaagactgcaaaagcgtggaactggaggagtggacacagctgccacaggcagcgtctttgacatctctaatttggatcgacttggcaagtcagaggtggagctggtgcagctcgtcatcgatggggtgaactatttgattgactgtgaacggcgtctggagagaggacaggatattcgaatccctccacctcttgtncacagcanacattaactccccatccccagcggatgagtcaagacccccaggacttctgcatatttaacagtggcctagtctacttgccctggacctgcctctcttcctgtnctagtaaagactccgcattatgttgcaaaaaaaaaaaaaaaaaaaagcggccgcn

SEQ ID NO: 1759 - DNA, 590 bp, Mus musculus
acggcatggttagtatacacctttaatcccaacacttggaaaacagagactggctggtctctgtgagttcaaggtcaacctggtctatatagtaacttccaggcagccagggatacacagtgaaaccttagccataagaaaatagcaataataattttaaaaaaccgcattggctctctagagacaactacaggtgagtcgaaactaaactgtgaagtagttactttcattgaattcttgagttgggaatcagcagagagggccacttccctcttgaagctcacatcttgagctatgagctgcggagaatgcacaggggagtggctggcccaagcgtgcacctgcccttacagtgaagttaaaaaaaaaatcaagacaccttgaaagcttcccaggtttctgattcagaagacggggtgagcctgacttccaacaactggtgaaggctgcaggccacgccatgagtacccaagctgtggccacagccctgaagccttcggtgggaactgtggccgacactactacccttttggatcatttatttgcctctcaaaggacaggctgagctttccagggtggcaaacggtata

SEQ ID NO: 1760 - DNA, 685 bp, Mus musculus
  misc_feature (1)..(685): n is g, c, a or t
gggaccatcccaggtgctggaggcactcagagactcacccgagcagtcggcaaatcgctagcaatggagatggtcctcaccggtgaccgcatctcagctcaggatgcaaagcaggcaggtcttgtaagcaagatttttcctgttgaaaaactggttgaagaagccatccaatgtgcagaaaaaattgccagcaattctaaaatcgtagtagccatggcgaaagaatctgtgaatgcagcctttgagatgacgttaacagaaggaaataagctggagaagaggcttttctattccacctttgccaccgatgaccggagagaagggatgactgcatttgtagagaaaaggaaggccaacttcaaagaccactgagaactggcagctataccgtttgccaccctggaaagctcagcctgtcctttgagaggcaaataaatgatccaaaagggtagtagtgtcggccacagttcccaccgaaggcttcagggctgtggccacagcttgggtactcatggcgtggcctgcagccttcaccagttgttggaagtcaggctcaccccgtcttctgaatcagaaacctgggaagctttcaaggtgtcttgattttttttttaacttcactgtaagggcaggtgcacgcttgngccagccactcccctgtgcattctccgcagctcatagctca

SEQ ID NO: 1761 - DNA, 710 bp, Mus musculus
cctcactgcccttgtacttgaggtgtaagcttggcgttcagggttgtctcccttcttgttccacactaactgtactaacttagtacagttcttgagattcaacaccgttgtttttgccagtgacttagtgccttgcattcagtcagctctgtttatctgggtctttctaagcacaggaatagacaggcttccttctgtttcctctgtgcctttgtcatcctggaaacacaggagttcaagtagaactggagaaacaggctcccatctgctgatcatccccacagcttctctctctggttatatctgaaaacaggaagggatttgtgaatctggggctacagggcagatagtctccaaatgaagcttaagagatggagtaccgctaaagcacagaaggccgtgtccttaaagattcgttctgatgccacccaagtttaattgttctagaactttaaagctaggcctgtaagcccagcactcaggagcctgggactaggactgctgtgagttcaaggtcagtctaagctacacagtgaacaccaggccagcctgagctgcagtgtagactgtctcaaatgaagttttcacccatattgagagttctgaactcttggttttccttctggggcccagggcgactacgtgcacaagtctgtgttcatcatttttttccaaggcgatcagctgaaaaacagggtcaagaaaatctg

SEQ ID NO: 1762 - DNA, 736 bp, Mus musculus
cagattttcttgaccctgtttttcagctgatcgccttggaaaaaaatgatgaacacagacttgtgcacgtagtcgccctgggccccagaaggaaaaccaagagttcagaactctcaatatgggtgaaaacttcatttgagacagtctacactgcagctcaggctggcctggtgttcactgtgtagcttagactgaccttgaactcacagcagtcctagtcccaggctcctgagtgctgggcttacaggcctagctttaaagttctagaacaattaaacttgggtggcatcagaacgaatctttaaggacacggccttctgtgctttagcggtactccatctcttaagcttcatttggagactatctgccctgtagccccagattcacaaatcccttcctgttttcagatataaccagagagagaagctgtggggatgatcagcagatgggagcctgtttctccagttctacttgaactcctgtgtttccaggatgacaaaggcacagaggaaacagaaggaagcctgtctattcctgtgcttagaaagacccagataaacagagctgactgaatgcaaggcactaagtcactggcaaaaacaacggtgttgaatctcaagaactgtactaagttagtacagttagtgtggaacaagaagggagacaaccctgaacgccaagcttacaccctcagtacaagggcagtgaggaaaaaaaaaaaaaaagcggtcgcacg

SEQ ID NO: 1763 - DNA, 732 bp, Mus musculus
gtgggtgtagctaccgaaaatgtcaaaaggggtatttagatcaaagtatatttgcatcggatagtgttactctcatatagtagatttcaatttataattcctggatccacatctgtgatcctggcctgctgcaggacatgatgaatctaaggtggagtgcacaaggggatgtctctgctgtacactccagtattcttctagtttaacccggggataaatgccgggggagtgagtggtttgcctgcaatgtgaactgggccccttggctgactcttggcttactacacttatggtgaccaggatataggactaaccacctcccataggctgttgctcagatacaacaggatgccaagtgcctatcacaccacggatacccagatgagggtaattatcctcactgtcaccagaaatcttccatcatctccacctccgagttccatagatccccagcccttggctcctcacagcctatgttttggaacagtgggggtgtgagggtggtcatggagcaagaaatggctcagaactacaaaaccagtgggttgctctctaactagagtcacaaggcaaagacttgacattgcggaggaaaacacatttatcttgggaagtccaccatccacgacacggaattttcattgataattaatctgaatgtcctttcggctggcagtgctgagatttcgggaaggaagaggcagcacctaatctctaggcagcaacgagaac

SEQ ID NO: 1764 - DNA, 669 bp, Mus musculus
tgagttacaatgacactgccccaaggatcctgttttgggcacaaaacttctctgtggcatacaaagacgagtggaaagacttgacctccctcacctttggtgtggagaatcttaacttgaccggctccttctggaatgactcctttgccatgctttcactgacctatgagccactctttggtgcaacagtgacattcaagttcattctggctagtcgcttctatccagtgtctgcccgatattggtttgccatggaacgacttgaaatccacagcaatggctctgttgcccatttcaatgtttcccaagtcacaggacctagcatctattctttccactgtgagtacgtcagcagtgtgagcaagaaaggcaatctccttgtgaccaacgtgccctcagtctggcagatgactcttcataacttccagatccaggccttcaatgtgactggtgaacagttctcctatgctagcgactgtgctggtttcttctctccgggcatctggatgggtctgctcaccaccctcttcatgcttttcatattcacctatggtctgcacatgatactcagcctaaagaccatggatcgctttgatgaccacaagggccccaccatcactttgacccagattgtgtgacatacacctgagaggaattgagggagtattg

SEQ ID NO: 1765 - DNA, 614 bp, Mus musculus
  misc_feature (1)..(614): n is g, c, a or t
aagttgacagactcattgcaacacagaaacaaaaaacacaagctatgataaataagaacaatcccaaacacacggagggcaggcatttctcagaatggcacggacattacttcctaggggtacagctgagccaaggccaggacctgagaagaacccagggccccatccttagccccaggtttaagggtactcaaaagctgcagacaccctgagggtctgtgctacctgttgccacgtaaaagctggacttagaaactcccaggcatggaggctcagagtcccttggaatctacactgctatttttataaaattggtgtgtaaatgtgattaaatgtatgaggagccgagggcagaagtcttcagagctaatgcagatgctcatgcacttatgggcggacgaggttaaagctgggttgtgctgtgggttaaatgaaagcatttccaatgtgantattcagaacggcaactctgaccacacctccagtgggttgagtgctgcaaagggcagtgtccacctctcccgagcatcctggtcaccgtgcaaacacactctggcctgagggggcataggactgtggcttgggtcatcccctgccacagtggaagagtgtgg

SEQ ID NO: 1766 - DNA, 551 bp, Mus musculus
gccatgtttacggctggctccaacttcaaccatgtggtgcagagtgaaaagtcagacacccacactctggtgacaagtggggtgtatgcttggtgccggcacccctcctatgtgggctggttttactggagtatcggaacccaggtgatgctgtgtaatcccatctgtggcgtggtctatgccctgacggtgtggcgcttcttccgagatcgcacagaagaggaggagatctcactgattcacttttttggggaagagtacttggattataaaaagagggtgcccacaggcctgcctttcataaagggggtcaaggtggagctatgacggggtgaggccccgtgggaccggggaacctctggccctgcgcagcctaggacaaaactgtttcaagttgggcactgcagagtgagttttcttaattgttttatatgtaactaattactcctcagaacgtcacccaggacctaatgttgagaagaccttgggtccaaaggagccacggcagccgtctcccgcactgaagtcaggtggagtaaggagtgtgtcaa

SEQ ID NO: 1767 - DNA, 695 bp, Mus musculus
  misc_feature (1)..(695): n is g, c, a or t
gatgatacatcagaaagcgtttacagtatcattttattcatactgatttgcttcatcacatgtaccaaaattttcatgaattatgctaaataaacacatatgtatatgaagggatctaggctaccactatgcaacatgtctatggagaaacttattaagtttttcaacctcagcagaccaactgatataccaactttaataccataaaatagataactaggagtggtagaaatgaaaagaacactggaacatttcagggtttctttcccatcaactttgtagatgtcaataccatttggtaatgtcaaaggttggctatccttagtgcacttttgtcgctgaagattcaattatttctgtagaagacacaacactgatttatgaagtgtgattcatagaacaagattatcctctgtaggaaccctacactagtgctactagctattgaaactcaatcaattatctctgtgtcttcaatggggttttaatactacttatcttagaggtgtgttgcataatatatattcagattattggggtcaaggagtacttgtaaaatactgacctttactgatcaatactttatttttttaataggttttccaaattgcctctaccaatatgacatttacacttaaccttaaggaatctggagancactatctacttgcatgttgtggaagagtgtatagggt

SEQ ID NO: 1768 - DNA, 229 bp, Mus musculus
tgcggaggttcacgacctccgtggtccgtcgcagccactatgaggagggtccggggaagaatttgccattttcagtggaaaacaagtggcggttgctggctatgatgaccgtgtactttggatctgggtttgccgcacctttctttatagtaagacaccagctacttaaaaaataaggatatttaattcatccctttaacaggtaattagtaagctttaattttcctaa

SEQ ID NO: 1769 - DNA, 364 bp, Mus musculus
ggagacttcacatttattaactggtgtgatacaagttggaattactgaattcccataaataaaatttcacttttgaacatttgctccggtaacttttaaccaccaacagactttgtaactgcctgacgctaacctgacaggttggcagtctttcaccactggccattcaatctgcttggtaacaagtctttgggcctctgtcattctaaggtatggcctactgccctcctttctgtacgatctgggcaaaccgaccggtgatggcaagagtagtgtcaatgaagcgatccacacagctagagaggcagttttcagtgcgggagtctagccgacttcctggcttctccacacactggatagtcga

SEQ ID NO: 1770 - DNA, 382 bp, Mus musculus
gtgtgtgggagaagccaggaagtcggctagactcccgcactgaaaaactgcctctctagctgtgtggatcgcttcattgacactactcttgccatcaccggacggtttgcccagatcgtacagaaaggagggcagtaggccataccttagaatgacagaagaccaaaagacttgttaccaagcagattgaatggccagtggtgaaagacctgccaacctgtcaggttagcgagaggcagttacaaagactgttggtgttaaaaagtaacagagcaaatgttcaaaagtgaaattttatttatgggaattgagtaattgcaacttgtatcacaccaggtaataaatgtgaaggctgcaaaaaaaaaaaaaaaaagcggacgca

SEQ ID NO: 1771 - DNA, 654 bp, Mus musculus
cagggttaggcttcctgaaagaatttgaagcttttggctaaaaatttattgacccctctatttgtgtcatttctcaggatgcatgaccctccccacctaggtcagagtgctagtcatactggtgggaggggtaggtggtgtgtccgtcatactcattggtggtgaggcaccgtagcatgaagtggcccaggtcatgcttggatatgaccctcgagggccctcgtccatccagggtcactgtgtaggccccagttagtagttggtctcctatgtgtgggggcatcactgccacgtatttcagccctgactcttgcagaatcttatgcatccggatgtggtcatcggtcacgtcctgcaggcgtgggggcaccttggtcgggtcccatagtaggaaggccgaggtgcaggccacgaccttgtccactccatgtgccttcatggctgtcacgatgttccgggtgccctcggacattactgtagtgggactgaggtcgttgccagtgcccagtagcacgatgacagcttcctgcccagccacagtcttgtccacatcggccgcctgccgaacatctcccaccaccacatgggcttgctggggtccttctgacggcagcctgctggagtctcgaaccagcaccgtcacctcataacctg

SEQ ID NO: 1772 - DNA, 401 bp, Mus musculus
gaggggggaaaggaaataattaatgtgggcgagacctggaacaccgaaatatgactgtcaagaagagcgagagcttcggtgccaccggcaggaccgggctcaccacactggcgcaggcggtgcaagcaggttatgaggtgacggagctggttggagactccagcaggctgccgtcagaaggaccccagccagcccatgtggtggagggagatgttcggcaggcggacgatgtggacaagactgtggctgggcaggaagctgtcatcgtgctactgggcactgggaacgacctcagtcccactacagtaatggccgagggcacccggaacatcgtgacagccatgaaggcacatggagtggacaaggtcgtggcctgcaactagaacttcctactatgggac

SEQ ID NO: 1773 - DNA, 555 bp, Mus musculus
gtttttgaggaaaggcctcatatagtccagaatcgccctcaactccatatggagccaaggatgtcctaaagctgttcatatgtctgcttctcccccaagggctggaactatgttcctagacccgagtgggctttccaaaagctctgcatgtgcttctccaagcgtctatggcaccgtcttcaacgtactggcttagtgtttctcagatcgtgtaagggatctaacaaagcctacacgcaacagcttataaactcctcttcttcttttcaaaatattaaatcttcattcctgattttgtgaacaccatttgattcacattattatgcctctgtaatgttggtgagatctgaacatcagaaataccatttgttctgaagacgagaaggtttgatttatcttttggctttggggggcagcatttggtaaactggaagatgatactgtctgagcgcacagtttccatctggtagcaattcaaaaggtccttaaggttactgaagttcctcttagtcccgctgaggttgtattctccattctcattcttcggatagtcga

SEQ ID NO: 1774 - DNA, 580 bp, Mus musculus
  misc_feature (1)..(581): n is g, c, t or a
aagaatgagaatggagaatacaacctcagcgggactaagaggaacttcagtaaccttaaggaccttttgaattgctaccagatggaaactgtgcgctcagacagtatcatcttccagtttaccaaatgctgccccccaaagccaaaagataaatcaaaccttctcgtcttcagaacaaatggtatttctgatgttcagatctcaccaacattacagaggcataataatgtgaatcaaatggtgtttcacaaaatcaggaatgaagatttaatattttgaaaagaagaagaggagtttataagctgttgcgtgtaggctttgttagatcccttacacgatctgagaaacactaagccagtacgttgaagacggtgccatagacgcttggagaagcacatgcagagcttttggaaagcccactcgggtctaggaacatagttccagcccttgggggagaagcagacatatgaacagctttaggacatccttggctccatatggagttgagggcgattctggactatatgaggcctttcctcaaaaacaaaaaaaaaaaaaaaagcggccgctgagcngccct

SEQ ID NO: 1775 - DNA, 551 bp, Mus musculus
aaaataaaacaaatctttttaatttgaaaatcaaagcaggcacattaactggttgaaaacacgatgagctgagagtgtggacacagcgaattgttcagactgagtttgcagagccgcagataggaacggaccttcccccttgatgtgggaaagaatcagaccacaccaggctgcattcatctctcccgctaacgtttatcaaacaagccccagagcagacgttcaccaagtttgcacaactttgtcacggactagctggccgtgaggttcagtggcatctggaggcaggagagccaagtaaacgggggtttcggccccctcttccacggtccgggagccctggtccctcgccatgtcggtcttcacccatcccgggcagcaggcattgagcagaatcctgtccgctttcctcttttcatccagctgccgggccaggatcctcgtaaggactgtcacccccagcttcgacaccccgtaagccgagtctggccaaccttccctctcatggacttcattttttgtatcctccacaaactttttcatgaggtcga

SEQ ID NO: 1776 - DNA, 579 bp, Mus musculus
aaaaagtttgtggaggatacaaaaaatgaagtccatgagagggaaggttggccagactcggcttacggggtgtcgaagctgggggtgacagtccttacgaggatcctggcccggcagctggatgaaaagaggaaagcggacaggattctgctcaatgcctgctgcccgggatgggtgaagaccgacatggcgagggaccagggctcccggaccgtggaagagggggccgaaacccccgtttacttggctctcctgcctccagatgccactgaacctcacggccagctagtccgtgacaaagttgtgcaaacttggtgaacgtctgctctggggcttgtttgataaacgttagcgggagagatgaatgcagcctggtgtggtctgattctttcccacatcaagggggaaggtccgttcctatctgcggctctgcaaactcagtctgaacaattcgctgtgtccacactctcagctcatcgtgttttcaaccagttaatgtgcctgctttgattttcaaattaaaaagatttgttttattttaaaaaaaaaaaaaaaaaaaaagcggccgcgacgcgccct

SEQ ID NO: 1777 - DNA, 783 bp, Mus musculus
ctaaaaataaaataaatgttttatttggaaaaagtcagcttcttacacaaggttttaaatctatattcaccctgtcaattacaatggtattttaaacacattgagtacaattcagtgtcatatgtcttatttttttctgcctctattcagaagacatcaggttaaaaaaaaaaaaaacccaaaacactgtagttccaatctggtccatctttcctcttatccttacactgaacccatttttctacatttcaggtgagtgaaagggtcatgaaagttcaggtgtggaggtaagactatgtcaaataatcgtaaagcatgatacaagttctcagcaaacttcctcccattttatctttattggcttccctgaggccaaactctaaccctcgtggttttgcaaatactgaaaaacaatgtaaaaaaaacaaaagcacatccattcagtcggtactgaatcatcccacatacagctctaaactagtagtggtataaatggaactatcaaaaaccaagagaaaaggtttcaggggtcaaggagaaggattccagggtgcctgtgggttgtggctcagtggtacagcatgcacttagcatgcttgtggccctgggttcaaacctaagaaccaacacctcagagcccctcaaacccacacatacctaagattctcataccgtaactaaggtttggggaaactacactgaattcagctgctgcttgaaatactgcatacattaaatcagacgtgttaaagagttgttttgtagatgttaatactaaccttt

SEQ ID NO: 1778 - DNA, 575 bp, Mus musculus
gcatatccacctgctaggtatatatttaagaaatttgaaacataaaattttgggaacatcttggcagttccagccacagcctgtcacctgctgggcacttctcaaatgcttactacagcctcgtgctgaagtgttatcactaaactgtcacctttgctcctattcagagacactgaaatcaactgcaaaaggttagtattaacatctacaaaacaactctttaacacgtctgatttaatgtatgcagtatttcaagcagcagctgaattcagtgtaggtttccccaaaccttagttacggtatgagaatcttaggtatgtgtgggtttgaggggctctgaggtgttggttcttaggtttgaacccagggccacaagcatgctaagtgcatgctgtaccactgagccacaacccacaggcaccctggaatccttctccttgacccctgaaaccttttctcttggtttttgatagttccatttataccactactagtttagagctgtatgtgggatgattcagtaccgactgaatggatgtgcttttgttttttttacattgtttttcagtatttgc

SEQ ID NO: 1779 - DNA, 822 bp, Mus musculus
acattaaaaaaactttattgttaatagcaaattttcatttcttaatttttaaataatagaaatgaataggagttagatgtcaagaaataggtaaaattataatttaaacgaagacaatcagcatttttaaaatgtgtaaagttagtcaaactttgtaaagcagtaagaacacggatggagctggtggctgcctgatgcaaacactaaagccacactggccacggccacatcctgtcagttccctcgctgctcaccatgcttcacatgtcagcgctctcggagccagaacaaacggctcagagcgaggactttagtcaattacaagtatcatccattaattacaagtgatgccctgccaagataacatcctttaagataagactgaggacacaaggcctgtgaaagtaagacactcacgctggcagggtgagtataaaacaaattttggcccactgaggtcaccaggctcagtgccaccaggtgtctcctcagaacccgacggcttctcagaactaaggagtgggacactgctgagtgtgtcggcagctttcccgtgtccagctttcctgaaacacaacagcttactgctaaaatatactgccagatcagtgggaaaaacaatcagactgaaaatttgtagcataaatgtgctaaaaacattattcccaatccacaagttgttttctcaaattgagatatattccgataaaattaatcttatgaaaagttcaaaatacgcgaacacctaaaaataataaaagaggaaggacattatggaaaagtcacgaccaccatgatttacaccacggcgccccagagcgc

SEQ ID NO: 1780 - DNA, 530 bp, Mus musculus
tttgcccccagaccttcggttggaagaggggggaagttgtggaaactcaagtgagatgtttctccccttacggtcacgggctctttcacgccaatgatacatcaccgcctaagttgttttactagtgatgcaaaatgctgtgaaggaggccatctttctatacaaaccacggtgacaggtcactcacattcgatgcgtgcctttaaaatcagtgtacacattctctgtaaataggatttgttagggtaaagaagcgctctggggcggcgtggtgtaaatcatggtggtcgtgacttttccataatgtcctttcttttttattatttttaggtgtttgcgtattttgaacttttcataagattaattttatcggaatatttctcaatttgagaaaacaacttgtggattgggaataatgtttttagcacatttatgctacaaattttcagtctgattgtttttccactgatctggcagtatattttagcagtaagctggttgtgtttcaggaaagctggacacgggaaagc

SEQ ID NO: 1781 - DNA, 755 bp, Mus musculus
ggtcaatcctgtcctttattttatggttaagagggagtgtggtgtgatgtttaaggcattttgtgaggtgaaggatgtcctctcaaatcttgacagctcatctgtaagtggctccaaatgggacttcatctagcatcccaaaaggctaagaaacacacatgtgcacattgggccctgagatccactcgcccaggttacccaggaccccaggaccagaccccgtccctattctagaagagacaccaagtccgcaagttcagccttcatggctctgtccccactgtggtagctgaggaggcttcagctgctggtcacagatggtgggccacctcccagaggatctgcagggccatggagaaacaggagaactgggccaggacataggccccggagcgaaggcgtgggttcagcttgcccaggtaggccacggtgtgtaccacacggcctgtgaggacaacgaggaaatgtatccaggcgatcagagggttgggtcccaggaatgagtacacgaagccgaggaagaggaaaggatagattgtctccatgtcgttgcggtgggctctgaggcagcgcccacatctgggtcactcctgtaatactggaggcctccacgtttcagcgcatcctcggggttggcaaaagccttcttccgcagcctcatctggcctgtgatgacagccaccgcgtacatcttgatgaccagcagtgtgctcagagcagaaaggccgggagcacctggccgctctccatcacca

SEQ ID NO: 1782 - DNA, 574 bp, Mus musculus
  misc_feature (1)..(600): n is g, c, a or t
ccgagttgaagtccaggccggctagccgagatgccttccccgggcctggtgatggagagcggccaggtgctcccggcctttctgctctgcagcacactgctggtcatcaagatgtacgcggtggctgtcatcacaggccagatgaggctgcggaagaaggcttttgccaaccccgaggatgcgctgaaacgtggaggcctccagtattacaggagtgacccagatgtggggcgctgcctcagagcccaccgcaacgacatggagacaatctatcctttcctcttcctcggcttcgtgtactcattcctgggacccaaccctctgatcgcctggatacatttcctcgttgtcctacaggccgtgtggtacacaccgtggcctacctgggcaagctgaacccacgccttcgctccggggcctatgtcctggcccagttctcctgtttctccatggccctgcagatcctctggggaggtggcccaccatctgtgaccagcagctgaagcctcctcagctaccacagtggggacagagccatgaaggctgaacttgcnggacttggtgtctcttctag

SEQ ID NO: 1783 - DNA, 654 bp, Mus musculus
aatgtgcattgcatcacagttccactcatgtatttgcatattatttatagctgtaacagcagaaatgagtaataagagagctacatgactggcagaccttaaaacactctctggctgtttacagaaaagcttgctggctatttatagagcaaacagaatacttgtattggggtatggagctaaagaacagaggcatgctttccagtgtccctgaactacgagtgacttgaaacagctcctggtcagatgctgatgacttaaatgctctgcagacaggctgtgcggactacagcaactctatcatctacctatcagtgagcagaccatactccagatctgtgtataactgtacatatacacagctaagcaaaaacagacgaggcaggagccagccaatcccaggataaagagcccagagagaagaaggaacctaaagttacatctattatgctctagtaactgggttagagaaattttagtatgttttctctatatgcgagaaatacagatgccaccgttattaggaagtatactcgagaaaaaacaatttacaactgcacagtgtacccatgaattaagggacaatttttcttttagatatgaagtaacacagacttctacgaagtattgatcttaatcatgtaattaaagtaa

SEQ ID NO: 1784 - DNA, 663 bp, Mus musculus
  misc_feature (1)..(700): n is g, c, a or t
acacttaatagagtcattcaccttacaactccatgtggttcggcaaaattgactctactgttatgcagctctgtatttgctagaacaaacctaatcgcttttacaacttactaaagcaaaggcaaaacatagcaatgtcccttgagtagggtcaggtccttcactcattacctcacacgtgtgatctgttcacaaagagtctatgtttttaagtttctccaagatattatccatccaaagaattactagaatagcttcggaataattttcagtggcaaatgtgtgacgtaaagaatcatactcactaaaattggcatgaacctaagggacttacagacctgcactggttatttttgttgttgatactgctctatattttggcagaaaaaagggtaaatttttatcaagaactatagttcttattataatataagataaatagtaatgctataaattttctgtcccttgaatttctgtgataattcaagacactttctctcttttatttcatacatacatcatctattgatgactataaatttgagaacgctataatattttatgaaacactttgcttatgaattctactggtggatttctgaaaacttatttccttggnttggtagctnttcttttaagccccgtactagcttattactagca

SEQ ID NO: 1785 - DNA, 727 bp, Mus musculus
gcaccacacttggtttattcagagttaaggtcagcaccctgggcctcatgcatgataggtgaaggctacatgaagccttgcttcttaacctcggctggtctccccgggatgaccaaacacctgagatcatgctccgaattccctgagagccagcagcccactgaccccaaggggaaagataccctgggaggtctgggcctactcaggggaagggacctgaagcagtgaggtgacacgcctgctttactgccccagcagcgatttattggcctgctctcctgaggtcacaggtcagtggggccagccagatccctgtgctctgtcgggtcctcactctcttctgagattgagctggacgcagcaacccaggggagaggcctcgatccccaagcactccatgctgccagacttcagggcggctaggaggagacaccctaactggcagggaaaacagttcagaccataagcacggtgtcccgaggcacaggtcccggtcacatgttggctcgttcccgctgcagtcgagagttgtaggcgcgggacacggtattccaggcgtccatgtagcggtccatgcacagtgcgatgcatttctgctccgagttatccaaggagcccccgggcttcccgatgcacttccggaaacacttgtccgtcattctctggagcagctcctgcgcgttggccacggcgatctgcactttcacctgctccataatggcccccg

SEQ ID NO: 1786 - DNA, 574 bp, Mus musculus
gttgactgagcagccatggacagcggcttcggctcggattttggcggcacgggtggcgggaagctggacccgggggccattatggagcaggtgaaagtgcagatcgccgtggccaacgcgcaggagctgctccagagaatgacggacaagtgtttccggaagtgcatcgggaagcccgggggctccttggataactcggagcagaaatgcatcgccatgtgcatggaccgctacatggacgcctggaataccgtgtcccgcgcctacaactctcgactgcagcgggaacgagccaacatgtgaccgggacctgtgcctcgggacaccgtgcttatggtctgaactgttttccctgccagttagggtgtctcctcctagccgccctgaagtctggcagcatggagggcttggggatcgaggcctctcccctgggttgctgcgtccagctcaatctcagaagagagtgaggacccgacagagcacagggatctggctggccccactgacctgtgacctcaggagagcaggccaataaatcgctgctggggcagtaaagcaggcgtgtcacctcact

SEQ ID NO: 1787 - DNA, 820 bp, Mus musculus
cagcattgttattttatttagggcagagctggggaagtctgtgcccttttaccctcttcctccttcactcggtcctaccccaggtcaaggcactagaacctgctggaaaggctggtgagaagaccatgaagacttgcagggtttatgagcctttgcctcaaagcagcttccattcccacactccaaagatctggggacctccagaagtcttctaatggaatcatagcttttctggtcctcggctggaaggctgctgagggaagataccctgggttttcccttccctgaagctttggaggtctatggaagagacaagctcccctaagatagggacaggggcaacccctcagaagaggagtgccaagtacaggggatagaaggcctcctgagtgaagtccagatggcgtcttcacacagggtaggggttgtccaggactgccactcctgccgccacacctccgtctgcatgctccacggctttggttcgaagcaggtgccccacatgcttgttcatcaccagtgttgttccctgtctgacatagactccaaaaatacccagctccgagatacactggaccacttgggcagggctgccaggccgtagcaagcaattcctaaaaggctcaggttcaatcttctccatgaggatgtaggaggctctctcctcactgtccttcagctgctccagagcttgtaccatttcctccccgtataagttgtaactccaccctctctctggggcttcagcacaaagtggctaggagcagcaagggcctcagcaaatggctggtccccttcttcacccatgtccagtgaatag

SEQ ID NO: 1788 - DNA, 552 bp, Mus musculus
ccagctggggcagcatcttgcaggatgagaagcagctcgaagaactggcaaagcaggccatagacagggccctggccgagggcgtgttgctgaggtccgcacagcatcccagctcctccgacgtggtgacgtatgccccattcacgcttttcccctcaccagtacccagtgctctgctggagcaggcctatgctgtgcagatggacttcaacatactggtggatgctgtcggccagaacccagccttcctggagcaaacactgtctagcaccatcaaaaaggacgactatactgcccgtctctttgatatctacaagcaagtcctgaaagagggcattgcccagaccgtgttcctgggcctgaatcgctcagattacatgttccagtgcggcgcagacggctccaaagccctgaaacagatcgagatcaacactatctctgccagctttgggggcctggcctcccggactccagctgtgcaccgacacgttctcaatgtcctgaataagaccaaagaagcttccaagatcctgtccaataaccccagcaagg

SEQ ID NO: 1789 - DNA, 837 bp, Mus musculus
ccgtttttttgtttttttttttgtttttccttatataaataaaacagctaatttattaaaatatataaacagcatttatcttttatctgacaatttttaaatagcttaaaaagaaacaccaggtagtagaattttaattatctagaagtcaggaataaccaggaacctgtagttttagtctgttcttttaaaaagctgaaaactaaaactggaaaacttactttgcacaagtataaccccagaatttatttaggaggctgaggcaagagtctgagattaaagtcaacctccaaaagaccctctcattcaagaaaggaaatgaatcataaattaatgagaccacctatttgattgacaaaaccctccagagtttttctaaatctgaaaattgtagatcttgtctcccttaaggaaatatgtgatttaacatgagtttttactttctaagcttctgcattttacaggtagtcttatgcagaacttgcctgtactgtcattgcagcagactcagctcccagaattatgatgttgtttgtgttgcaagaggcaaataataacacgtagggtgaaggtgtgtgaagaaaagtcacattgggggctttctgactagttgagtgagctgtaggcctacgtgaacctcacagtctaaaatagtgaataaaagtaacgtcttcatacaataaattgttagaaagcttaagtgtatgttgtgtgtgtctgtggctttcaaacttaaagaccattatttttatatttatatataagacactaggtctactacaaagggcagggtattatttatatataatataatacacatacatacatacatatata

SEQ ID NO: 1790 - DNA, 656 bp, Mus musculus
ggcttagtaaggatcacttttgttcggaaaaacaagacactgtccgctgcattcaaatcaagtgcagtacaacaactgttggaaaaaaattacagaattcactgttcagtacagaatactgtaataccagaagatttcagtatagcagataaaatacagcaaatcctaaccagcacaggtttcagtgacaaacgggcccgttccatggacatagatgacttcatcaggttgctacatggattcaatgcagaaggcatccacttctcctagccatttgaaaactattttttcaagaccaagaaaaaatgaaattatacaatcctactatttgagaatacaaccaattttgttctacaggacatcatttaaattatttaataatacttttttaccatttattatcctgtatgtgaaaggtggttgggtatatatatatatgatgtatgtatgtgtattatattatatataaataataccctgccctttgtagtagacctagtgttttatatataaatataaaaataatggtctttaagtttgaaagccacagacacacacaacatacacttaagctttctaacaatttattgtatgaaagacgttacttttattcactattttagactgtgaggttcacgtaggcctacagctcactc

SEQ ID NO: 1791 - DNA, 580 bp, Mus musculus
gtttgcaaagttttactttaactctttgttgcccataaatgactaaaaaagccagtgtgcaggaggcagcctgctgcctgctgaaggcagccaggcaccaggtctgtctccaagacaagaggcactgctcagaacccccccaggctggggaccagacaggaaggaggtttggggtggagagataagccagggacccccaaggtctaccaaactctgttgggctgacaacttagggcactcaagactgcatggagtcgggggcagtgtgtatagttttggaagggtccacgtgctgccccaagggacccctggccagcaagtgggggctggcctgtctctgccagacaccctcctaagaaaacctttgggtgtcactgtctaatgtagtgtttaggggcacaggccaggctatggcctaaggcaggtaggtggttaggtggcaggcatggttcctaggaccgtagtgagctatttacctttcacttcctttctatagaccacagttcatggcaatgggtagacatggtactgacagctcacgctcacgctctccctccctctctcttcctcttctctctct

SEQ ID NO: 1792 - DNA, 585 bp, Mus musculus
tgaggccaccgtctcttcttcgccaccatgggggcccagctgagcacgttgagccacgtggtgctctcgcccgtctggttcatctacagtctcttcatgaagctgtttcagcgctccacaccggccatcaccctcgagaaccccgacatcaagtaccctctgaggctcatcgacaaggaggtcatcagtcctgacactcggcgcttccgatttgccctcccttcaccccagcacatcctgggccttcctattggccaacacatctacctctcgactaggatcgatggcaacttggtcattcggccctacacccctgtgtcgagcgatgatgacaagggctttgtggacttggtggtcaaggtttacttcaaggacacccatcccaagtttccagctggagggaaaatgtctcagtacctggaaaacatgaagattggagacaccattgaattccggggtcccaatgggctactggtctaccagggcaaagggaagtttgccatccgtgcagacaagaagtccaaccccgttgtcaggacggtgaagtctgtaggcatgattgcaggagggacaggcatcacccca

SEQ ID NO: 1793 - DNA, 779 bp, Mus musculus
  misc_feature (1)..(779): n is g, c, t or a
ggcaatacatattaatgtgtttattagcatcacaataaaattatacagctgaagcttgtaagccaaattctacatgaacagggatggcagacaattttccacaagctaagtttcattccattttcctcccgcagaattatcaaggcggcaaagctaacttgcaatgactgtgcttcccagcacgctgctcaaagctgtcacttagccacacactctaggcagcccacagtccagcccaaacctcgactgaccacaatcctgccttcacatctcatctgctctctacacactccttcctcgtcaccatacgcaagaaccacaggttcaaaacctgagttttaccccagacatctttgtcttctgatatccagacagaatagtgcttgaggaggttggttcgattctagcaatagtttcagatgggtcttctctccgtcatgatcagccagagacaattctgtaggctacctgagccgcctcctcttcctctctctgctctgtggggtccacttggctgcaacagtcccacctttcgtgatatgccattcaaacacagcattcgctttctttaccacctcacggccaacactcttgaggcggcgngctatctccccaaacacaagagcactctggagctctccaccctctgaaggtgtctgggttgaaactccagatgcaggcacgagatccacgtacgcatttgaaatgacaacatctccagtctcgtggaccttggtttgaaaatgaattctgcttccttccttccacatctcagtttg

SEQ ID NO: 1794 - DNA, 456 bp, Mus musculus
  misc_feature (1)..(500): n is g, c, t or a
accattgcccccaacgctgggtcacggatgacggagactgtgttgccggaagatcttgttgaagccctgaagccagagtatgtggcccctctggtgctttggctttgccatgagagctgtggggaaaatggtggcctatttgaggttggagcaggatggattggaaaattgcgctgggagaggaccctgggcgccatcgtcagaaagcggaatcagcccatgactcccgaggcagtgagggacaactgggagaagatctgtgacttcagcaatgccagcaagccgcagaccattcaagaatcaacaggtggtatagtcgaagttttacatataggtagattcaggaaggaatctcaccanaccgtaccagtcacgcggcacctgcagccacgtcaggattcgttggtgctgttggccataaacttccttcattntcttcttcgtatacggagctgc

SEQ ID NO: 1795 - DNA, 909 bp, Mus musculus
ccgtttttttgtttttttgtgaaagaacctgtttcgaaaaacaaacaaacaaacaaacaaacaaacaaagaaataaagacagggagaaaataaatttataagtgctaaatgatgagatagggtaggagatagataggagaatctctaaacatttctaaaagaaatatcagaggaaaattaggtttaaaatccttcaactgggctcaagcgccctgtgagactggactaagggcattttcctatacccctccatctgtgtcttttttgtccacagtaaaaaaagaatttgctaccacactcgttttcatccagatcaaaggaaagatgagaaacaaaagactgggttctgtgatgaaggagcagacgctgagctgtgattaggtctgaagtaatgggaaacagcctgaaccagtctaccaaatgtgtgattcggaggcctattctgccttcagtctctgccaagcatctttgtaagtcatctgatcttctgaagccactggaactacgttcactctctggcttaaagggtcccaagtaggccacggtacctttcctgagactttcaaggagttgatgggtatatcatttacagcaggtagaagtgttaaatttaaggaccaaggctctcaaaaccaggattggccatctccagccacagactacctcttcatcttgtcatacagaggaaagaaacactctccctggccgtttaagaaagctgtcttagcaagtaggagaaggatatatgcattacaatgtatagacaatgcccattccttgtcgcttccccacccatgaccactgttaaacatcctgacaggggatggcatttcagtatgtttaaactgatggtcatatacctaataaagagaccacactatttcccagccactaggactatacagatac

SEQ ID NO: 1796 - DNA, 587 bp, Mus musculus
catcaccaaagaaacctcagcttacctttcatacttcatgaaaagacaagtgaatgttgatgctggccctcggtcttaccacgcataccttaacaatgagtacactgtggccggatgccaccatcgtgctgggctgtcgtgggtctgctgtggacatggcttgcctaacttgtacttcctcctccagacagcttctcttcagatggtggattctgtgtctgaggagactgcctgagagcactcctcagctatatgtatccccaaaacagtatgtccgtgtgcgtacatgtatgtctgcgatgtgagtgttcaatgttgttggttattagtctgtgacataattccagcatggtaattggtggcatatactgcacacactagtaaacagtatattgctgaatagagatgtattctgtatatgtcctaggtggctggggaaatagtggtggtttctttattaggtatatgaccatcagtttaaacatactgaaatgccatcccctgtcaggatgtttaacagtggtcatgggtggggaagggacaaggaatgggcattgtctatacattgtaatgcatatatccttctc

SEQ ID NO: 1797 - DNA, 870 bp, Mus musculus
gtttttaaacaacttaaatttttataaaaagacaaatatacatatttacacaggtccaccacatgaccaaacaccatttagcagttaggtggcgtttctaatagatagtcaagagtcacgccaaggcgctcacaaccccccttttccctgggcctgctgaggactgccaaggcctgaggagacagcaggcaccaggcaaggcactatataaataaatgcaaaggcctagactggggagaaatgttagtgtacacctctgatcagaaatgtggcaaagtccacagagaaagtgccatttttttttcctgagccccacagctggagcaggtagtgaggcagattccctctgaggctaagggagccaaccttcacaggaccccattttttttcccttcacatttcactggcttgggaaccatcccagggctcggttgggaagggcagcagttctttgggaataggactcatttagtgcaattgtctcctagtacagagccagctctagggccagtgctatgctcttctgtgggcgctggtctattcccctcagggccagcccagcgataagaccctctctatgcaacaaggcttttaaaaagctagaagatgactcctgtccatggcctctgccttacacctcagaccccccaatccatcttcctaggagtcagggccagcttcacctcacaagaaaactcagactctgcctcctaagccctgagagcccactgacccaaggaggatggtcccctgtttgcagtgggactatgctttgccatgtgtcaaggggccacaggagtctagctttttttgtatcacagccaccatgatgccagggctaactcactcaggagggcaagacgggtcaga

SEQ ID NO: 1798 - DNA, 580 bp, Mus musculus
cactccttcgtcgaggtaggacgtgctttcacagtctaagccgaaccgaaccgaaccgaaccgaaccgaaccgggccgagttgcgccgaggtcagccgaggtggccagaggaccccagcatctcgggcatctttcgcttcgtgcgcgcatcgcgtacctacaccgcaactccgtgcctcgctctccggcaccctctgcgaatcgctcctgcagcaaagccaccatgccaatcactcgaatgcggatgagaccctggctagagatgcagattaattccaaccaaatcccagggctgatctggatcaataaagaagagatgatcttccagattccatggaagcacgctgctaagcacggctgggacatcaacaaggatgcctgtctgttccggagctgggccattcacacaggccgatacaaagcaggagaaaaagagccagatcccaagacatggaaggcaaacttccgttgtgccatgaactccctgccagacatcgaggaagtgaaggatcagagtaggaacaagggcagctctgctgtgcgggtgtaccggatgctgccacccctcaccaggaaccag

SEQ ID NO: 1799 - DNA, 811 bp, Mus musculus
  misc_feature (1)..(811): n is g, c, t or a
ggaaacagggatacatttaattaaattttataggttacatgtccttaagcttcttattgtagtccatatcactggctcaaacatgtgaaagccagatgtcgtgtgcattatgctacatgaacatgagtaaagttttccagcaggtcaatcccacagtgttgtccctgttgctgaaaccaggacctcccatttttaatccatggtgtaggggtggagaagttctcagtccagagcaagtaaaggctgcatgttttcttcttcacttttatccattcgtttcagtgctgtagggtccactactgactgagatctcttcatggatttgggggagagttccttgtccacgtccttcacaggcatgttatgggaatccacgttgtactcactgtcatcatcatactcatggtctagcagggttcgtgcccatgtgcccatgtcatatgggggcaacattcctccaaactcagaaggtaggatctcaggatgaattagttggtgtagactgttcaggttgttaccatgcaaaaatatccttttccgagtcttctctttcaggaatgggcgtatcacagtgtacagggcatggatataccaaggttgattgacaaaatgaattcctccaaatcttgctgggaagctgtcctgaagaccttcaattgcaagtcgcagcatgntttggtgtaagcttagaagcttgcttgaaggtgaagttactccagtctatgatcaaaacaaatccatttacttgaagctctggatcttcaatcatgggctctataagaagtaagatggcacgcaaaatatccaccag

SEQ ID NO: 1800 - DNA, 539 bp, Mus musculus
gatgctggggagtgccgcattgcttagtgactctgcctcgcggtttgctggaaaggaagcagacagcagtgaggagaaccggaggccagagtgtggtgtggaggtgacaagtaccaggtatattgttggacacacaaagagagaatcagagtagacagcttggatacaaggggacaatgactcatttgcaagctggcctctctcctgagactttggaaaaagctcgcctggaactcaatgagaacccagacactctgcaccaggacatccaagaagtaagggacatggtcatcactaggccggacattggctttctgcgcacagatgacgctttcatcttacgcttcttgagggccaggaaatttcatcacttcgaagcttttcgcctcttggcccagtactttgagtaccggcagcagaacctggatatgttcaaaagcttcaaggccactgaccctggcatcaagcaggcactgaaggatggctttcctgggggcctggccaatctggaccattatgggaggaagattttagtcctt

SEQ ID NO: 1801 - DNA, 623 bp, Mus musculus
aacactgacctggacacttgggcttctgcgtgtgtgtgagaccagaaccgtcgtcgcgtttcggggccacagcctgttgctggactcctaagactcctgcctgactgctgagcgactggtcctcagcgccggcatgatgaagttcactgtggtggcggcggcgttgctgctgctgggcgcggtgcgggccgaggaggaggacaagaaggaggatgtgggcacggtggtcggcatcgacttggggaccacctattcctgcgtcggtgtgttcaagaacggccgcgtggagatcatagccaacgatcagggcaaccgcatcacgccgtcgtatgtggccttcactcctgaaggggagcgtctgattggcgatgcggccaagaaccaactcacgtccaaccccgagaacgcggtcttcgatgccaagcgcctcatcggacgcacttggaatgacccttcggtgcagcaggacatcaagttcttgccattcaaggtggttgaaaagaaaactaaaccgtacattcaagttgatattggaggtgggcaaaccaagacatttgccccagaagaaatttctgccatggttctcactaaaatgaaggagactgctgaggcgtatttgggaa

SEQ ID NO: 1802 - DNA, 461 bp, Mus musculus
  misc_feature (1)..(461): n is g, c, a or t
actcatctttttctgatgtatcctcttcaccagttgggggagggcctccacttccatagagtttgctgataattggctgaacaatttcttctagttccttctttttggctttaaagtctttaatgtccgcatcctggtggctttccagccattcaatcttttcctctacagctttttccatggtttctttatcttcagaagaaagtttacctcccagcctttctttatctccaatctggttcttgagagaataagcatagctttccaattcattcctggtgtcaatgcgctctttgagctttttgtcttcctcagcaaacttctcagcatcattaaccatcctttcaatttcttcaggtgtcaggcggttttggtcattggtaattgtgattttgtttttgtttcctgtccctttgtcttcagctgtcactcggngaataccattaacatctatctcaaaa

SEQ ID NO: 1803 - DNA, 504 bp, Mus musculus
acacttttatttatgaaatgcttgatgaaccagtacaaagttagtgtctgtcagcaggctggcggaggcagttctggtgtctttcccaccaccattggtggagacagtggtcaaagtggttccatactccctccatctttgcagcagtgggctgggagaggccctggggcatgtagggggttcaagggcaggaggaagagtgagatgaagaagacccaagacaggagtcccttttcctggaataaaaaggcttgtcctcaggctgcctcgtagggctagggttctatggcgtagtggtttgaacttggtgacaggaaggcaaacctctctacaactctctcctgcctccccgggccagacttgggagtgcttcctttggctacttcacaagtacaagtcctctgtggttctctaggagtcctcagagatgtcctcccaaaggatcgaagggcactgccctcagaactcagggtttggggcaaggatccaggcacgatagggccc

SEQ ID NO: 1804 - DNA, 616 bp, Mus musculus
  misc_feature (1)..(616): n is g, c, a or t
tcttgaggtctgtggatcgatggtcagcagggacattggagaactccatcctcaatgcctacctacataccattcgagagagccagcactttctctacattgagaatcagttcttcattagctgctcagatgggcgaacagttctgaacaaggtgggcgatgagattgtggacagaatcctgaaggctcacgaacaggggcagtgtttccgagtctacttgcttctgcctttgctccctggctttgagggggacatctccacagggggtggtaactccatccaggctattctgcacttcacctacaggaccctgtgtcgtggggaacattcaatcctacatcgtctcaaagcagccatggggactgcgtggcgagattacatgtccatctgtgggcttcgcacccatggagagctgggcgggcacccaatctctgagctcatctatatccacagcaagatgctcattgcggatgacagagcagtcatcattggttctgcgaacatcaatgacaggagcttgctggggaagcgtgacagtgagctagccatcctgatcaaggacacagaaatggaaccatccctcatggatggnggtggagtaccaggcaggcagat

SEQ ID NO: 1805 - DNA, 518 bp, Mus musculus
aaatttttttgaacagcaaggtatctgataacaactagaactcatttgcataaaaaacatatttatctagaaattacattctacatacaggtgtaattccaagaagtttcattccattggctatagacagaacggacagctttgaaaaggtgaagtctggccccagccacatcaggaggactgtctttcacctggagtgttttatgtgccacagctgcaaggtgacttagagttaggaggtagctaacgatgtgcttcggctgtaggtcctgagatgacaggtaaagtacctcatcaaacctgagaagatgctggagaattgaaacagactgcggctcttgtaaacaagcaacattggagtcattgagatacccacatccaaaagtctcttccaaactacagaggcgggcatgggtgtactgcaggaagactccagtgtccccacggctctggaaaacacgatcccaactgaactgatagtcagataagagagtgcctctgaagtcctggatgatgac

SEQ ID NO: 1806 - DNA, 608 bp, Mus musculus
  misc_feature (1)..(608): n is g, c a or t
gtaaatatgggttaaaaagtgaacttttctcagatcttcccaagaagaggattgtggttgaattcagttcacctaatattgccaaaaaatttcatgttggacatttgcgctccaccatcataggaaattttatagcaaatctaaaagaagctttaggacatcaagtaacaagaataaattacattggagattggggcatgcagtttggtctgctgggaactggtttccagctgtttggctatgaagagaaactccagaccaatcctttacagcatctctttgatgtttatgtacaagttaataaagaagcaacagatgataaaaatgtaacaaaattggcacacgagttcttccaccgactagaaatgggtgacacgcaggcactgtcactgtggcagagattccgggacttgagcattgaagagtacacccagatttacaagcgtcttggaatatactttgatgaatattcaggagaatcattntatcgtgaaaaatctcaagatgtcttaaagttgcttgacagcaaaggacttctgcagaaaacagcggagggaaatgttgtagtagatctctctgggactggtgacctctcttctgtctgcact

SEQ ID NO: 1807 - DNA, 377 bp, Mus musculus
cttctttattgatacccagcaaacgtgacctcaattgtgatgggtggggactgtgaaccctgagccaggctggagtgaggggctattatagctcctgaagttgtccagcctaggtgtactgttttagtggtgggagggtattggaaaccattcaccagctcagggtgcccgggcagtacttgtcaaacagcccttgatagtagggccgcaggctctccacatccggtaggtcagggcacttcgtgtagagatcaaacttgttgaactcttgcttttggccatctctgggtccacatcgggtcgatagaccagggaagggtctgggccctggttaaataggaatttgacccatttcaccaccagccggatagtcgaaa

SEQ ID NO: 1808 - DNA, 388 bp, Mus musculus
gctggtggtgaaatgggtcaaattcctatttaaccagggcccagacccttccctggtctatcgacccgatgtggacccagagatggccaaaagcaagagttcaacaagtttgatctctacacgaagtgccctgacctaccggatgtggagagcctgcggccctactatcaagggctgtttgacaagtactgcccgggcaccctgagctggtgaatggtttccaataccctcccaccactgagccagtacacctaggctggacaacttcaggagctataatagcccctcactccagcctggctcagggttcacagtccccacccatcacaattgaggtcacgtttgctgggtatcaataaagaagaaaaaaaaaaaaaagggcggccgc

SEQ ID NO: 1809 - DNA, 323 bp, Mus musculus
  misc_feature (1)..(323): n is g, c, a or t
aagaaagagtcattaaagtttattatatgaaagagagcatggcttctgtacatacatttacaccagacttatttacagtaagatggaggctgtggcacctctaggcatagatgcccgtcggtggaagaggggtggggagcctcccatggctcaaaaacagggaacctcagcaaaaggggggccagcgcacgccggtgggaggagcagnggttcctgtccatttggaagggaggcttggcgcgtgtgtgctggaagantggngctcagagtccattcaggaccctggaagtgcnngggggatcctggctttgaacccagaacat

SEQ ID NO: 1810 - DNA, 457 bp, Mus musculus
  misc_feature (1)..(500): n is g, c, a or t
gaggagatgcgttccttcttagttctcccaagtcatggcacttcccagcaacttcctgttgggggtttgctgctttgcctggctgtgttttcttagtagccttagctctcaggcttctactgaagaatcccagagtggagccagtgaaaatgtggagtctgaggcagacccctggtccttgctgctgcctgtagatgggactgacaggtctggcctcttgccccccctctttaaggttctatctgatgggcgaggtgagacccctaagctgcagcctgactccagagcactctactacatgaaaaagctctataagacgtatgctaccaaagagggggttcccaaacccagcagaagtcacctgtacaataccgtccggctcttcagtccctgtgcccagcaagagcaggcacccagcaaccaggtganaggaccgttgtcgatggtggacctgctg

SEQ ID NO: 1811 - DNA, 460 bp, Mus musculus
ctcagtcaagatcatagcattatattaaaagtgaaaccattgtcctttagaaagaaaactaacggcggacaggaaggagggtgcaagggctggttgacaccaggaggcgatgagtttttggagctgacccggggccccacgagcgccctgctcctgggccccacacaggcactagggcaagccccaaggtctcgggctacaagatcaggacaaggactcagtctcagcatctgtgatagcagccagcctgccaaggcagataaggaggggaggggcgaagcatggtgaaaggaggcttccactcggctcaacactgaggtctgcatccccgaggttaaccaaacaccgtgttgtgctgttgggtcacccggatgaacgtggctctcctgctgagctctttgagcttggcagccccgacgtaggtacaggtggagcgcagtcctccaaggatatccagaat

SEQ ID NO: 1812 - DNA, 540 bp, Mus musculus
agcatgccatgtttacagccgttcacaagcactactccctggatgactggaaatgttttgcggaaacccaccccgaatgcctgcagcatgtagccgtgagttctggcagcgggcagaatgatcttgagaggatgagccgcatcttggaagctgtgcctcaggtgaagttcatctgcctggatgtggccaatgggtattcagagcattttgtggaattcgtgaaactggtccgatccaaattccccgaacacaccatcatggcagggaacgtggtgaccggagagatggtggaagagctcatcctctctggagcagatatcatcaaagtgggagtcggaccaggttctgtgtgcaccacccgaaccaagacaggagtgggctacccgcagctgagtgcggtgatagagtgtgctgactccgcccatggcctcaaggggcacatcatctctgatggaggctgcacatgtccaggagatgtcgccaaagcctttggagctggtgcagactttgtcatgctgggaggcatgttttcaggccaca

SEQ ID NO: 1813 - DNA, 636 bp, Mus musculus
ataagagttaaaaactatttgctgacctctgatctacatttaaagcaatggataacgaacaatgctttcaagtgactgtaagaacttattgttatgggagctatgtttttccaattaaacatcaacaatttgtttaacaattcgtcttgtaataaaacctaggtgtttatcattttattcattttcttctaaaaagctcctaacgatttcagaaacatatgaaatgtgacttacacatatgacttacacagtaacaaactatgagaggtctgaccagtacagagtagagacctccctcgtattttctcttaatgagctttgagtgtgagcacaacagcagcagctcacagctttatgatgtgtgcgtgtatcaaaccactactgataaagaggacactgcaatccttgtcactcttcctcatctcgagcaggacagtggtaaatgcagggctcaaactcaactgagcacatttctgaatgcaaattccatatataatatttactttttaaagaaaaatacgtcctacctacttttgttttaacagtgtctaaggtacgagaaatggccactaatcagtatctcatcttaaataatataaagaaattattggattacctattatcacaaaacttact

SEQ ID NO: 1814 - DNA, 689 bp, Mus musculus
gatgcaagaccattcagtattatagtaggttttggtgacttgccttactttaatcatgacatttcaaccagctagaaacatctttgggtgtgttttatgaatttgaagtcaatggcaatatgttgttaagaaatatatagtaaattagatactggtgacataatattaatatatccatgattccagcactaaattccataatgtttggaagtgatttccaaagtaagttttgtgataataggtaatccaataatttctttatattatttaagatgagatactgattagtggccatttcttcgtaccttagacactgttaaaacaaaagtaggtaggacgtatttttctttaaaaagtaaatattatatatggaatttgcattcagaaatgtgctcagttgagtttgagccctgcatttaccactgtcctgctcgagatgaggaagagtgacaaggattgcagtgtcctctttatcagtagtggtttgatacacgcacacatcataaagctgtgagctgctgctgttgtgctcacactcaaagctcattaagagaaaatacgagggaggtctctactctgtactggtcagacctctcatagtttgttactgtgtaagtcatatgtgtaagtcacatttcatatgtttctgaaatcgttaggagctttttagaagaaaatgaataaaatga

SEQ ID NO: 1815 - DNA, 693 bp, Mus musculus
acctgactgctggagactgccttttgcaggtgcagagatcggccttgcagtttgcaataatgtctgaaccaatcagagtccttgtgactggagcagctggtcaaattgcatattcactgttgtacagtattggaaatggatctgtctttgggaaagaccagcccatcattcttgtgctgttggacatcacccccatgatgggtgttctggacggtgtcctgatggaactgcaagactgtgcccttccccttctgcaggatgtcattgcaacggacaaagaagagattgccttcaaagacctggatgtggctgtcctagtgggctccatgccaagaagggaaggcatggagaggaaggacctactgaaagccaatgtgaaaatcttcaaatcccagggcacagccttggagaaatacgccaagaaatcagttaaggtcattgttgtgggaaacccagccaatacgaactgcctgacagcctccaagtcagcgccatcgatccccaaggagaatttcagttgcctgactcgcttggaccacaaccgagcaaaatctcaaattgctcttaaactcggtgtaaccgctgatgatgtaaagaatgtcattatctggggaaatcattcatcgacccagtatccagatgtcaatcatgccaaggtgaaactgcaaggaaaggaagtcggtgtgtatgaag

SEQ ID NO: 1816 - DNA, 737 bp, Mus musculus
cacttgaatatacttttatttagattgcagcactaacaacatgatagactttcacaaatcataaagcacacactatttaaaatattttgctgttcacaatttgaatgtagcattattactgtttggtactaggctcaaagacgacattttgattcctcagccttcggtacatgctgatgtcaaaacgagtgtctagtcacgcagaggagagaaactcaaaagcggtctccttttcctcggtcagctcctttgctgtcaggtccatcttttcacgggagaagtcattaatggggaggccttcaacaaacttccaggtcttattcttgatcacgacagggaatgagtagagcaggtcatcagggacaccataggagttgccatcagagataacacccatcgacacgaactctccctctggggttccaaaccagatgtctctgatgtggtctgcgatggctttcgagcagacattgcactggacagcttccgagccttgatgacagcagcaccacgctgttgcacagtcgtgatgaactctcccttcagccagctgtcgtctttcagggcttcatacacaccgacttcctttccttgcagtttcaccttggcatgattgacatctggatactgggtcgatgaatgatttccccagataatgacattctttacatcatcagcggttacaccgagtttaagagcaatttgagattttgctcggttgtggtccaagcgagtca

SEQ ID NO: 1817 - DNA, 629 bp, Mus musculus
atatgaaaatttaatttttataggcaatttaagaaatagtgctttttacaatctttataatcatttaagaaagtagggtagaaattaaaaactgaaacaaaattatacattttattttaaaaaactatatgttctcttatgaatcacgtaatgcaattaaaaacatggccctgtttaactatggcttgtttgtttgtttgtttgtttgtttccgattttggttcatttaattacaaagtctcggaaggcttctcatcttgatggagttacctttaacagcccttgccttttaactttggtttggtgccatgtttaaacaccaatattaaaaatacttagcacctcagatagtcacagctcatgagcgctttgctccagcctggaccattgagaagtagatgcccttctgcgccgattgctgtggggtgccgtgctccttgactttgccgttctcaatcaccacgatcaagtccgcgttctggatggtggacaggcggtgagcgatcacaatgcaggtgcggccttccctggctttgtcagcgcttcctgacatcatcaggcagtgagtcgatgaactggtggatgttggcctccttggctgctctcacaatctcctcatgagacacggc

SEQ ID NO: 1818 - DNA, 628 bp, Mus musculus
agcacagagggcttgaagcctactctgttagaaggaaatgtaaaatttaatggagtccagtttaactatcccacccgacccaacatcccagtgcttcaggggctgagcctcgaggtgaagaagggccagacgttggccctggtgggcagcagtggctgtgggaagagcacagtggtccagctgctcgagcgcttctacgaccccatggctggatcagtgtttctagatggcaaagaaataaagcaactgaatgtccagtggctccgagctcaccttggcattgtgtcccaggagcccattctctttgactgcagcattgcagagaacatcgcctatggagacaacagccgggccgtgtctcatgaggagattgtgagggcagccaaggaggccaacatccaccagttcatcgactcactgcctgatgttgtccaggaagcgctggacaaagccagggaaggccgcacctgcattgtgatcgctcaccgcctgtccaccatccagaacgcggacttgatcgtggtgattgagaacggcaaagtcaaggagcacggcacccaccagcagctgctggcgcagaagggcatctacttctcaatggtccaggctggagcaaagcgctcatgag

SEQ ID NO: 1819 - DNA, 737 bp, Mus musculus
  misc_feature (1)..(737): n is g, c, a or t
gggggggggggttggttctttttcaagacagggtttctctgtgtagccctggctggactagaactccctttgtagaatagcctggcctcaaaatcacagagatccaccagcctctgcttcctgaatactgagattaaaggcaaacatcaccacggactggcttcaaattgcattccaaagttcccaagaagggcatcctgactgaactaatgaagataaaatgtattccctgataaacttctgtagcaaaaactaaaacttcaagcaacatataaaatgaagagtttcctggtacctatcatagtatttacattcccttatctcaaagacctggaaacacaatgtcaaactgactggtcacaaaaattattctaaaagtacaaatggatgtcacagacaaggaatctgacagtttgacatccccacccacctctgagccacctcctcccacagcactggaaaagatcaaaaccgcctgccacagacggggtgcccagggtgaagaaggcggggacagtaaggcacggaagacactgcctgccacacagtgatncagtgcacgaagacaccacctgtgtccaccaggccctggagcaaggctctgtctgatgcatcagtgcacccagtcctttgatggcgaacacttcagaatttagctctttggaatctctgggggagatgcatgtactccatcttgctgttagaggtaagacatcagatactttcgatcctggatc

SEQ ID NO: 1820 - DNA, 650 bp, Mus musculus
  misc_feature (1)..(650): n is g, c, a or t
atgactcctacacccccagggacaagctgtggcagcagctgaggagagggcggtatgtggagtttaatctgttgtatgatcggggcaccaagtttggcctctttactccaggatccaggatcgaaagtatcttgatgtctttacctctaacagcaagatgggagtacatgcattctcccccagagaattccaaagaagctgaaattctggaagtgttgcgccatccaaaggactgggtgcactgatgcatcagacagagccttgctccagggcctggtggacacaggtggtgtcttcgtgcactgtggccactgtgtggcaggcagtgtcttccgtgccttactgtccccgccttcttcaccctgggcaccccgtctgtggcaggcggttttgatcttttccagtgctgtgggaggaggtggctcagaggtgggtggggatgtcaaactgtcagattccttgtctgtgacatccatttgtacttttagaataattttctgtgaccagtcagtttgacattgtgtttccaggtctttgagataagggaatgtaaatactatgataggtaccaggaaactcttcattntatatgttgcttgaagttttagtttttgctacagaagtttatcagggaatacattttatcttca

SEQ ID NO: 1821 - DNA, 824 bp, Mus musculus
aaattaatcttttcccttgcttatactttaaaaattctcatctatgtgtaaaaaaaaaaaccttactaattataacactgccactgttccaatcttctctcgaggagcccctccccacctccctcaccatccatccatccttccttcccatgaccaccctcttccctctgcccagcacctaagagcagggatcccacggcggggagatgagcaggggtgcggtctcgcctggccttctgttactaggatgtggctttggagaaggctgccaggatgctcgcaaacacgatgtcaggggtctgggacgcatcgatggcgcagtgaatgccgcgtttcctgtagtactccacgagcggagtggtctgagtgtggtaggcctccaggcgggtcttcaaggctttctcgttgtcatctgacctgcggatcaggggctccccagtgatatcatctttcatgggctcctttggagggttgaattcctcatggtaggaccggccactcttggggtgaatcagcctcccagtgatcctccggatcagcagcgagtcttggatgctgaactcaatgactgaatcgagcttctctttcctcttctccatgaggtcatcaagcatttcagcctgcctcacagtccgagggaagccatctagaagaaagccatttttgtacgaaggagtctccaaattcttctcaattagctccacaaccatttcgtcactcaccagtttccctgcatccattgtcgccttcagcttttttcctagctctgagccagaagctatcatggctctcagcatgtccccggtggccaaatgacagacaca

SEQ ID NO: 1822 - DNA, 536 bp, Mus musculus
ccccaacgtgttggcttccgaaccggagattccgaagggcatccgggccgtgttgctggggccgcccggggctggcaaggggacgcaggcacccaaactggctgaaaacttttgtgtctgtcatttggccaccggggacatgctgagagccatggtagcttctggctcagagctaggaaaaaagctgaaggcgacaatggatgcagggaaactggtgagtgacgaaatggttgtggagctaattgagaagaatttggagactccttcgtacaaaaatggctttcttctagatggcttccctcggactgtgaggcaggctgaaatgcttgatgacctcatggagaagaggaaagagaagctcgattcagtcattgagttcagcatccaagactcgctgctgatccggaggatcactgggaggctgattcaccccaagagtggccggtcctaccatgaggaattcaaccctccaaaggagcccatgaaagatgatatcactggggagcccctgatccgcaggtcagatgacaacgaga

SEQ ID NO: 1823 - DNA, 605 bp, Mus musculus
atatttatttattatacaaaaaaaaaaaaccttccgaagttccagatcttactatgaaaaatgacatgcagtggttcatgtagtcacaggactgtaggctactgtcataaagtcgccatggcttccacggcatcgatgaggtgtaaggcgaggctgtactgcccgtgcttctctggcaggagctccatcactttatgcacgagtttagctgttgctgcaataggcacgccaggttctgaagatcctgagggttcattgccttcagccaggtgcagagtgtgggcgggagtctggccagcagctccatgccttccttcgtctgggtgtggaaaagcgcgtgaccagcctttgcccggtcagcactagcagctgagacgccagaacttctttgtcctgaacttgaaaaatggcctcctctcctaagaggtcagctccatggctgtacagtcccccacatagtgccttcgaatgacatcgtcgctcacttgaaggtgatgggctaagtccacagccaaacctggccagttgaggtctttccaatgagtgtttgctgcttctgcaagggatctttgtccttggaatgctgagcctggacagctgcactg

SEQ ID NO: 1824 - DNA, 680 bp, Mus musculus
  misc_feature (1)..(680): n is g, c, a or t
agggatgtggggatgagcgacacggcgctgacatccttcctcggctcctgcctggaacttcttcagacgtcattggaggctgacattagcagggatgaagtccaggtgcccgtcctggacactgaggacgcctggctgtccgtggaaggccccatctctatagtggagctggcgctggagcagaagcctatccactacccactggtggagcaccattccgtcctgtgctccatcctgtacgcgtccatgcgcttttctctgaagagtgtgaagccactcgccctttttgacagcaagggaaagaatgcattttttaaggatttaacttcaattcagttattacctagtggggaaatggatccaaattttatttcagtaagacaacagttcttactgaaagttgtcagtgcagctgtccaggctcagcattccaaggacaaagatccctctgcagaagcagcaaacactcattggaaagacctcaactggccaggtttggctgtggacttagcccatcaccttcaagtgagcgacgatgtcattcgaaggcactatgtgggggagctgtacagccatggagctgacctcttaggagaggaggccatttttcaagttcaggacaaagaagttctggcgtctcagctgctagtgctgaccgggcanaggctggctcacgcgct

SEQ ID NO: 1825 - DNA, 559 bp, Mus musculus
aaccactgctcatttattggttagtgggatacagcccattagaacacacggcatgcatctggggagagcaactgcacttcagccactggtagccctgctgagtcggcaaggcagtgcagatggcacccaaggaccaggcagggatgacgtagctgtctacggtggctaagattcaggtgcaaagtctttgcaaacagatttacttttgttactcaggaattacaaagagggaggccccatctgccccgttcttaaactaaaggctaacggggttggaatcatttgaataacccaccatccaatcatgttcatgtgcaaattataatccatttccccttcagtaatttcccctgtcaactcatacccctcagaattataaacactatatgaataaggaaaagactaacagtgaatgtaaagggctatgtatttgactccagtatcttttatgtcaaacagccaatttctcatgtagatgcttgaattcgagaatcccagcgacacttaaaaggacaaaaagatggaattttactggatgtcagaccattaattagaaact

SEQ ID NO: 1826 - DNA, 718 bp, Mus musculus
caggcggcggtggtgcagtgtctatgtcctcggaggtgattagggggactgcagagatggttctagagctgtatgtatctgaccgagaaggaaatgacgcaaccggggatgggaccaaggagaaaccatttaaaacaggcctaaaggctttgatgacagttggaaaagagccatttcccaccatttatgtggactcacaaaaggaaaatgagagatgggatgttatttctaagtcacagatgaagaacattaaaaagatgtggcacagagaacagatgaagaacggctctagggagaagaaagaggcagaagataacttacgaagagaaaagaacctggaggaagcaaaaaaaattattattaaaaatgacccgagcctgccagagccggcctgtgtaaagattagtgcattagaaggatacagaggccagagagtgaaggtgtttggctgggtccacaggttgcgcaggcaaggaaagaatttgatgtttttggtgttgcgagatggtacgggttatcttcagtgtgtcttgtcagatgacttgtgtcagtgttacaatggagtagtcctgtccaccgagagtagtgtggcggtgtacggaacactaaacctaactccaaagggcaaacaggctccaggaggccatgagctgagctgtgacttctgggaactggtggggctggccccggctggaggagctgataacctgatcaacga

SEQ ID NO: 1827 - DNA, 945 bp, Mus musculus
atattattaaataacacatttgactttcacaatgagtggttctaggaatgtggtctgatgtttttaagactacataatgtctataggtttaaggagaacatcttcctcgaagcaagcatttcccacttctcagctgttgatttctcagtgggcaggtacaacaattgatccacactgatacctctttgctagaaagttcttttctctgatagctgacatatttccagttactgaaatcaaacaacagaaccacatcgggacttccaaatgttcaatgacattatttagcaaaataaatttattaaaagtattcaaaaaccacttcaaagtttagctgcccgcaagacagttttggcactcgtaacagacgctggttctacagcacggcacagcattcggtccatcacacacaccatttaacaactcaaacatacttctcagtttcagtgatacgtgacacactagtactaatgatctgtagtcctaagaacgtcaacacccttgcacacagtaaacattgtaatgttacttagtactaaaatattaaaactagaactaacaccactatgtggtaacatggactagtttagggaaggtgtacagccaactagctaaggccacataatcccagacctattgattttaaatgctccaacaacattgcatcggatctttcatctcaaactctgctttcccgacaaggaggaagaacacattcagaggcctgttccctccctctgttcttcacacagtgagggaagccgttctcacacagagcctcccctaggttgctgacttcctgattcactacccaacattgaatcaatagctctgagcgatgttttcctaacactcaggctgatttcaggtcagttttttttttttttctggcaggtcacagcctttgctcttgggagacagaatggaatgtcctttgtgtgtggg

SEQ ID NO: 1828 - DNA, 681 bp, Mus musculus
gagaatgcaaagtgccatgttcctggctgtccagcacgactgcgtacccatggacaagagtgcaggcaacggcccaaggtcgaggagaagcgggagaaaatgaagcggacactcttaaaggattggaagacccgtttgagctacttcttgcagaattcctctgctcctgggaagcccaaaactggcaagaaaagcaaacagcaaacttttatcaagccttctcctgaggaagcgcagctctgggcagaagcatttgatgaactgctggccagtaaatatgggctggctgcattcagggcgtttttaaagtccgagttctgtgaagaaaacattgaattctggttggcttgtgaagacttcaaaaaaaccaaatcaccccaaaaactgtcctcaaaagcaaggaaaatctataccgacttcatagagaaggaagctcccaaagagataaacatagacttccaaacgaaatctctgattgcccaaaatatccaagaggctacaagtggctgcttcaccacagctcagaagagggtgtacagtttgatggagaacaattcttatcctcggttcttggagtccgaattctaccaggacttatgtaaaaagccacagatcaccacggagccccatgctacatgagaccaggagtccccccacacacaaaggacattccattctgtc

SEQ ID NO: 1829 - DNA, 833 bp, Mus musculus
agacacagaggccaggaacactcctggagacctttccttcctttattgagataataatcagggtagaatacagcatgaagggcaggaggaatgcaggaccatcctggagcgcatgcagtagtaagatgtggttgagaagcagtggaggagggggaccaagagcagcccatcaaagggtccagccacacacatgggaaagcctctgggccaggaaaggttggagaaggggctgggaactttgggaaaggcccctggcacctgtgggtggtaccctatgcatttagctaatggcactcagtgcttgggtcagggtgtgcagctcatcctggaccccctctaaggagcgccggatggtgtgaggactgtccagtacatcaatggccagggtgtacgggtcaaacttcacagagaatgggcgctggatacgagaggcatagttcctgagcttgtccttggcatcactgaagctctctgacacgaatacaccggctggtaggtttgatcttggtagggctgcacggctgctgtgtctgggtcaaaggcccggacctcgggctcctctgacagggagtgcaggagctctccataggaagacagcagccctgcaccgtaagccttcagctccccattctgtttacacagcccaaactccacagtgaaccagtacaccgtggagagtttttcaatttcttcatctgaagcccccagagatgcaagtccaatgtcctggggagaactggggcaatgtgcggtcagccaacatgggtacgtgtcccagcagctcgtggcagcagtctggctcgggtgagtgcataggtgaggaggcatgacgg

SEQ ID NO: 1830 - DNA, 595 bp, Mus musculus
tactgaacaggtccacttcacccacatcctaataacttttctcttccattacccctgctggatggtgggctagaaaagaggtcaaacacttattaaaagtcagccgcaaaaaatgtatggctacaggtgaacatctggtgtccgagtccccaaggttcattggacggcggcagagtctcatcgaggatgcccgcaaggagcgggaggcagcagcagctgcagcagcggctgcggtagcctccgcggaacctgggaacccattggaggctgtggtattcgaggagagggatggaaatgctgttctcaacctgctcttctccttgaggggtacaaaaccctcctcactgtctcgggctttgaaagtgtttgagacatttgaagccaaaatccaccacttagagacccggcctgcccagaggccactggcaggaagcccccacctggagtactttgtgcgcttcgaggtgcccagtggcgacctggctgccctcctcagttctgtgcgtcgggtgtctgacgatgtgcgcagtgccagagaggacaaggttccctggttcccaaggaaagtgtcagagttggataagtgtcaccacct

SEQ ID NO: 1831 - DNA, 831 bp, Mus musculus
ggagacaaggaacttttatttgcagcttccgagtgacacggttctgaggggcagggtgctactctctcatctgactagctcagtgaaagcaggcagggacacttccttgtttaatggcagcaggcacagcagtttctgaaagaaaagtgactccctgacagattcagttgaccttgtgcagggagaggacaactgcacacaccagtgccagggcggctcagctgccttcccagagcagacaccagtgaacaaaccgtcaggtctgctcagcactaagagcaaggctgatgacagggacaggagggccgtgccatgcacccagtcttgggcggtcaggcttcttgtcttactggaaggtgttaccagcctacaactggatgcctgcttattcagcagaacacattccagataggtactgcactctgaatatggggagagaagggagccagcagcctggtagagactccctgactgcagcccatttgcaggctgacaccccgctgtgtctgtccgcctctgcaggtcagggcagctctgagctagtcatccactgtgatgttccggaagaggtaagccatagactctccattgtggattctccgaatcgcctcagaaagaatcaggctgatgtccacagtctttatcttgggacactgtagtttctgaagttcatgagggacagtgtttgtcaccaccacctcatcaatgggggactctcaatcagacggggggcttcacagacaggatgccgtgcgtggccatgacatagatcttgtagcacctctctctttcaggatctctgcagcagcaacaaagctctccacgtcatca

SEQ ID NO: 1832 - DNA, 591 bp, Mus musculus
tggcgaaagctggtttaactcacattatcactatggacctccaccaaaaggaaatacaaggctttttcagctttcccgtggacaaccttagagcctcacctttcctgcttcagtatatccaggaagaaattccaaattacagaaatgcagtcattgtagctaagtctcctgatgctgcaaaaagggctcagtcctatgctgaaaggctccgcctggggctggctgtgatccacggagaagcgcagtgtacagagctggatatggacgacggtcggcactccccacccatggtcaagaacgccacggtgcacccaggcctggagctgcccttaatgatggccaaagagaagccaccaataacagtggtcggagacgtcgggggacgcattgcgattatagtggatgacatcattgatgacgtggagagctttgttgctgctgcagagatcctgaaagagagaggtgcttacaagatctatgtcatggccacgcacggcatcctgtctgctgaagccccccgtctgattgaggagtcccccattgatgaggtggtggtgacaaacactgtccctcatgaacttcagaaactac

SEQ ID NO: 1833 - DNA, 725 bp, Mus musculus
aaatacttgaaaattcaaaaccacacaaatatatgcttttactaaatgtggggagaaaagctttaaacagtcttcaaatatagttgcattttccagtactccaaagatgcccttcgtcactggttgcaagttagtaggatttgccaggatgcgatggtaggccttcactagtgcaggcggacagtgttggtactcaaggctattactacagttctaatggacaacattaagccaatgtcagaaactgctaatctgttactgcctatatcaaattgtaaatattttcataatggcatacgtgtcctaagagctgcttgactgctcactaagtccagtgtaatttcttggtttcacttaattgtgtttccaatgtgaactgggactattatattggcccatttataaataacaggaacaaaaagccctagcgtcccaatgattgaaaccagaagaaacgtccatagaaacatccgatcgagaacttgggctatgaatttccaatcttcaacaacctcgcggacgtcgttctctttcactacgtgtctcgtgatgtagcgaatgcaatcgagcgcggcctccaaagtattccgagatttaggtccaccgtctttctcggcttcttctctctgagtgaagtacctatcggcatgacttctcatgcagagcagtttgggaagcttgtggagaaatatcttacgaacccacggcgccatagcattgtgtgt

SEQ ID NO: 1834 - DNA, 597 bp, Mus musculus
gacttttttgacaatggagaatgggaaatcatgagcgcaatggggagcaaggggaaccggacggacagctgctgctggtacccctgcatcacctactccttcgtgatcaaacggctgcctctcttctacaccctgtttcttatcataccctgcatcgggctctcgtttctgactgtggttgtcttctatctcccttcaaacgaaggtgaaaagattagcctgtgcacttccgtgctggtctctctgactgtcttcctgctggtgattgaggaaattataccgtcatcttccaaagtcatacctctgatcggggagtacttggtgttcaccatgatcttcgtgaccctatccattatggtgactgtctttgccatcaacatccaccaccgctcttcttccacacacaatgctatggcgccgtgggttcgtaagatatttctccacaagcttcccaaactgctctgcatgagaagtcatgccgataggtacttcactcagagagaagaagccgagaaagacggtggacctaaatctcggaatactttggaggccgcgctcgattgcattcgctacatcacgagacacgtagtgaaagag

SEQ ID NO: 1835 - DNA, 616 bp, Mus musculus
gatgtcacagccatttattgtgctccagtgaaatagaaaagaatgtgttcgagttacaaacgctgctgtcacatccacaaacaccagtcactgcaaaaccaaaatgcgtgtgtccactgcgtttccaggcatgcatctgctcccgtcgcaggaatggggcaggggtcaggccaagcctgggttctgggggcttcgctggaagggtttctggttctgggaggtacttacttgtgacggaataaaggggggcacctgaaacagctcaactcagtgcttccttcgggcactgttggggacacccagttctatgttgggccctgcgaaactccagggatgaggggcccccttcttcccattgccccctcggcctcatctccccaaaccgtaaccctataggcaggtgccagggggctgggaggacgccatgcaggagatggggttggctgggacagctgggtccagccaagatcagcagccagccgcttggaggcccctaggcagagttgtagtagttgtgcgggtggtgattgtaggtgggctcactcagctctgagtactccgggttcatgcagtacttgggatcttacacctggcgaggaatcgcatacactgtcat

SEQ ID NO: 1836 - DNA, 226 bp, Mus musculus
tgctagggtggagctccactgcctagccatgccttagcctctctgtgggagactccaggcagggtcttagaaccacactaaagcccagatctccatgctggagaacataggtaatttcatcaaagccattaccaagtatggggtgaaaccccacgacatctttgaggccaacgacctggttgaaaacaccaaccatacacaagttgaggccaatctcctggctctg

SEQ ID NO: 1837 - DNA, 747 bp, Mus musculus
cagagtggcaccagtgtttattgagggctcagccctcggaaaactggcggtacagtcgctgcagtgccgggtccagatgctcctgtaaccggaatggaatctcaaggatctccaggaagccttcagccagtgtgggcggctcaaactgcttcctgtagctaaacatgaccatgtccgacacaggtgcatgcgaagggtcggtcatctcacgaaacctgttgttgtggcgtgcctgctctattgtagcacagaagttgaaacagcggcagggcacacctgcatctttggcacattggatgtacctggcccgacttgggacatctgggttggtgttgtcaatcacgactcgcttcccctgcctcagtgccgcctggcatgagctcacacagcgctgccacgagcccagcgtgtccctgttcacatggacgtagccagctgacactaggtgctcctggatgaaagtggacttgccggccccagggaatcctactgcgaccaccacctctgggttggggctcaggagagagctggactctggaaggtagaggggcccagcactggagatagtcctcgggtcgaaagctggaactcaaagcgggcagccggccacttaaggaaaaactcttccggagtggcaaagggcaggccgacgttaagggcgaacaggcggtctgcacaagagaaatccttttttttcctccccggtgcccagttggctaggcccctgctgcatctccacgaagacac

SEQ ID NO: 1838 - DNA, 551 bp, Mus musculus
  misc_feature (1)..(551): N IS G, C, A OR T
ctttggaatgaattcagaagtgactctacctatatgcaatcctcactgcgcattggaaccgttgtggtagcttgggaaacgtcgaacccgcccatgggcaaggggcggaatttccggtgtggctcgcattgggaaagcagaacttccggtggcgggtgggttgccggctgctgagcaagctccactgtgattctgttccccttcacagcatccgaggatgtcacagcttggatcccggggccgcctgtggctgcagagccccaccggtgggccgccccctatattcctgccgtcggatggccaagccctggtcctcggtcggggacccctgacccaagtgacggaccggaagtgctcccgaaaccaagtggagctgattgcagaccctgaaagccggacagtggcagtgaaacagctgggtgttaacccgtcaactgttggggtccaggagttgaagccaggactgtctggctctctaagcttgngnggatgtcctttatctggttaatggcctatatcccctgaccctgcgttgggaagagctcagcaca

SEQ ID NO: 1839 - DNA, 870 bp, Mus musculus
  misc_feature (1)..(900): N IS G, C, A OR OT
cagagagtggattaattttatttacattacttcagacgctgggtttcagaaaagccaagagtcacagaaagccctcaggaggctcctacagaggtccagttaaaagataaaagcagagatgggaacgtgggaacggccactaaggtggatgcaaagtgacaacgngttcccttctcaactgaggtgctctcaaaaaacaaatgaatacctacacaactgttttcttcatgcaggacagagatacataaaaagagatattctgtaagctaagcagacacatgggtaattattctcataggtgtcgataaataggtgcaattgattaaatccactaatactgaaatgtttacacaaagtgatctacaatttcacttctaagaatttgtcttttacatacactcccaaaggcgtgccaagcccacgcaggaatccaccgcctcacttctcacatctctgtaagggctaatatgctacagactgtttccactatggtgcgcatagtccatcagttagagataagtgggagcttccgggcctctctcccctggctggcagctggcatcagcttctctggggactccaagactatacaagtgagccttgtagatgccaaagaaccccaggtctcgtaccaccgacagggcgctgactcgggggccagtggtgatctctccggccacttgtaagcggattttcacaatctctaaaggatttgtgaaaatcacttgggagcctccagcacagcctccaggcaaaatctctgccaaaagtgggacggagcatctttgtgcataaattatctctcacaaatcgttcactgtaagtttatggccttctccgggcgactccagtaactgtggcagcaaactc

SEQ ID NO: 1840 - DNA, 616 bp, Mus musculus
  misc_feature (1)..(616): N IS G, C, A OR T
tcgccatccggcagaggaggcctttctgtcggctaatgagccaagttttccaccgtgctacggtggacatgcatttcaggttaatatccttccaagagtttgtagcctttgagtctgtcctgtgtgctccggatgccttgtttatggtggcgttccagctgtttgacaaagctggcaaaggagaggttacttttggaaatacagttggagcacgcgaagcaagcctttgtgcaacgagacaatgccaagacaggcaaagtctcagccattgacttccgggacatcatggtcaccatccgtccccatgtcctgacgccttttgttgaggaatgtctagtagctgctgctggaggcactaggtcccatcaagttagcttctcctattttaatggatttaattcgctccttaacaacatggaactcattaggaagatctacagtactctggctggcaacaggaaagacgtggaggtgactaaggaggagttcgctttggcagcccagaagtttggtcaggttacacccatgggaagttgacatcttggtttcagttagcagatttatatgagccgagggggcgcatgaccttagcagacattngagcggatcgcccctc

SEQ ID NO: 1841 - DNA, 685 bp, Mus musculus
  misc_feature (1)..(685): N IS G, C, A OR T
agagtttcctagccttttattgaaggtaccatgataggacatgtcgcttggctgtcagcattgtctctgtcacaaaagagatggctgtggacagaagaagcgccggagtcctatagtagtgcccatttgtaagggcaggagaaatgaggcaccgtagactgctgggtaccactgccatccagaccagtggagatggagccaagcatggaggggaccctgggaggcatgagaaattcaggtgccagcctgcccccaacatgaatagcctgaggatggagatggccatggcccagaaggatcaggaaatgtgggttggagagggaagcagggatcagggatggaacaacaggcacagagagaaggctgggagggtgtaagagagctgtggggctaaggcagagcggncaaagtggagggccacttccacgttggggttgctaagggtgggctcaaaccacttctgcagacaccgcccactgttcctgcgctcgggactggccttgaatgtgttattccagatcttctcacacaggtcatccggggtggggaagtgatacgaaaaagggaggcagggctcatgtgcggggcagtgtttcttctcctcactccagtcccagccatggagccagttggatttacaagtcaaagatgagtggcaggctcgccaccagccctcacaatcctc

SEQ ID NO: 1842 - DNA, 629 bp, Mus musculus
tctttggcatcaggaggagcaacaggagggccctgccttgaaggtcatggcacagtggtggcagatcctcttggggttgtgggcagtcctacccaccttggcaggggacaaactgctcagcgtctgcatgaattccaagcgccacaagcaagaacctggcccagaagacgaactctaccaggagtgcaggccttgggaggacaatgcctgctgcacacgttccacaagttgggaagcccaccttgaggagcccttgctctttaacttcagcatgatgcactgtggactgctgaccccggcctgtcgcaagcacttcatccaggccatctgcttccatgagtgttcccccaacctggggccttggatccagccggtggtcccaaacgggcaggaagagcagcgggtttggggcgtgccgctgtgccaggaggattgtgagggctggtggcgagcctgccactcatctttgacttgtaaatccaactggctccatggctgggactggagtgaggagaagaaacactgccccgcacatgagccctgcctccctttttcgtatcacttccccaccccggatgacctgtgtgagaagatctggaacaacacattcaaggccagtcccgagcgca

SEQ ID NO: 1843 - DNA, 788 bp, Mus musculus
gttgtattttcacattgggattcacgcataggagcactgtgcccttgagctggtgacagaggctgtactgtgtctccaggagaatgtgctggctgtgctttagggccgttctgtttgacacttccaggggcactatctagctcctccatttccgagtcactgaacccaggcggtgggtctccgtaaatggaagactccacggagtgctctggggacgctcggctgggactcgtgttcagtgaaatgccagagtcagagtcattgaattccattgtgccttcagcgtgcttcgggttgaaagctttacacagtgacaggtcacagccttcaatagtcccgtccaggagttcagagagtgactgactgatggcagcggaggaaggcatgctgccaccgtcactgggctctgctatgaaagcagaataaaattcatcgccaaaatctgtgtttaaggtgggatttgagtctaaggaggtcagctggctggcatcatcagtggagaggatgctgctgaaagaatcctcaaaaccatgaaggaaatgtggaccacagttgcccacttctttttccagcgaggagatcgatgagtaaaaatggtaattgctgtccatttctgtcagtgtggcttctgggctgggaacacggtagtatcagccagctgcttgttttcggtattaagacactgtaattcgggaatggaaaatagctcctgccaaacttgctccatgtcctgctctatgctgcttaaatcagtcatggctgcctccagagagctattgagggactgg

SEQ ID NO: 1844 - DNA, 605 bp, Mus musculus
  misc_feature (1)..(700): N IS G, C, A OR T
gaaagccaagtgtgaaacttgtggagaagtcagagcttggtggtttctccaccaggacatggatttgattgacatcctttggaggcaagacatagatcttggagtaagtcgagaagtgtttgactttagtcagcgacagaaggactatgagctggaaaaacagaaaaaactcgaaaaggaaagacaagagcaactccagaaggaacaggagaaggccttttttgctcagtttcaactggatgaagaaacaggagaattcctcccaattcagccggcccagcacatccagacagacaccagtggatccgccagctactcccaggttgcccacattcccaaacaagatgccttgtactttgaagactgtatgcagcttttggcagagacattcccatttgtagatgaccatgagtcgcttgccctggatatccccagcccgctgaaaggtcagtcttcactgcccctcatcaggcccagtccctcaatagctctctggaggcagccatgactgatttaagcagcatagagcaggacatggagcaagtttggcaggagctattttccattcccngaattacagtgtcttaataccgaaaacaagcagc

SEQ ID NO: 1845 - DNA, 609 bp, Mus musculus
  misc_feature (1)..(609): N IS G, C, A OR T
gtttcaataagtttattgtgatattcaaagcttccacgatagcgtcctttagaaaatgaaagcattgcccgggatccgttttttgaaagagcagtgcagtcggctaagtccagctcgctcctgcagtggccgctcctgccgctgtaccaagtccaggcggtcgcctgcctttctttcccctcctttcactggaaggctgcttgctgagtcacacctgcctcgctggtcggttcttcccggccctggggccaacgtcctcgcctaggccttcctgtgctagcagcctctccggacactggcagagtcctgggctcggaacaaggtgtccccgctgccgccagacccccttcttgggaggccgcgctcctcgctctccaggcaacatcgcctgccagtctccacgcgaactcgagcgccctcggagggccactccagagccagcagcgcgctagagtgtcaccaagtcgatcagaccaaggtccctgccaggctgtcactcgggaagggtgatgctgggcaccagtcgttgaagctgcggctctgctcgcagaacaaactgagcttctccaaggcagggntcttacatgtgntctcattaggattcgaaat

SEQ ID NO: 1846 - DNA, 574 bp, Mus musculus
gcgcatcggactctgggaatctttacctgcgctcgggttccctccgcactcttttggataacttgctgttcgtggatcgcacaatgactctggaagaagtccgtggccaggatacagttccggaaagcacagccaggatgcagggcgccgggaaagcactgcacgaacttctgctgtcggcgcagcgccagggctgtctgaccgctggcgtctacgagtccgccaaagtcctgaatgtggaccctgacaatgtgaccttttgcgtgctggctgccgatgaagaagatgagggcgacatagcgctgcagatccagttcacgttgattcaggcgttctgctgtgagaacgacattgatatcgtgcgcgtgggagacgtgcagaggctggcggcgatcgtgggcgccgacgaagaggggggcgcgccgggagacctgcattgcatcctcatttcgaatcctaatgaggacacatggaaggaccctgccttggagaagctcagtttgttctgcgaggagagccgcagcttcaacgactgggtgcccagcatcacccttcccgagtgacagcctggcag

SEQ ID NO: 1847 - DNA, 616 bp, Mus musculus
agctgctccaaaggctgtatcctagctttatttttaaagggcctgcgccgcagagtcaatataaaaacacaaaaagtcccgtcagtttaataacaataaaaaaccccaaaagtggaaaactgagggcaagggaaatgacccctaggcaggggcacggggatccctgctcatggcaccaggcctggctgcagggtcccccggtattgctgttgctacgaggttggggggcagcgattgtcctgtgggagccacggccgtctgagtcaggaccctcatttcttctggggtgtgctcagcttctgcatgccccggatcttgtccagcaggccagagatgaaggcctcagtgggtttgtaacagtcaactaacagctccttgaccctagcagcccgggtatcatcactctccatgtctaaaagttcatccacatctatctcgagctccgggatctcctcctcctggcagtcgtagagtaacgtgactgttctaaaatccactcctccaggttgaggcgcttccgtagctccttgcggtcgtacttgacggtgacttcccttgccgtctcaccgggccatcgtcatcagcgccccccgggccttcgcctgcggccccaggg

SEQ ID NO: 1848 - DNA, 701 bp, Mus musculus
ggggccgggcagtggcagcacagggccccgagtctacttccagagtccccctggggccgcaggcgaaggcccggggggcgctgatgacgatggcccggtgagacggcaagggaaggtcaccgtcaagtacgaccgcaaggagctacggaagcgcctcaacctggaggagtggattttagaacagctcacgcgactctacgactgccaggaggaggagatcccggagctcgagatagatgtggatgaacttttagacatggagagtgatgatacccgggctgctagggtcaaggagctgttagttgactgttacaaacccactgaggccttcatctctggcctgctggacaagatccggggcatgcagaagctgagcacaccccagaagaaatgagggtcctgactcagacggccgtggctcccacaggacaatcgctgccccccaacctcgtagcaacagcaataccgggggaccctgcagccaggcctggtgccatgagcagggatccccgtgcccctgcctaggggtcatttcccttgccctcagttttccacttttggggttttttattgttattaaactgacgggactttttgtgtttttatattgactctgcggcgcaggccctttaaaaataaagctaggatacagcctttggagcagctaaaaaaaaaaaaaaaaaaaaaaggggcggccgcca

SEQ ID NO: 1849 - DNA, 695 bp, Mus musculus
gataccagtgcttgaccagacggatgaggttccagagcttgggcgcacgatacctcatgaagttctgatggaggtcggtgaagcagatggagaaatcgccctccttctccagggtggtgcactcatggatgagttgggcgtagactttgttgtagaattggggttcagcatacgtgttgtttctcagttcatataggacatcataggctggctgcacatcaaattccacctcctgctggagctcgggggagctcagcttgaagctcagagacctggagttgggctcctctgagctctgcacctcaaacttcactttaaatggtttctcttgctgcagctgacacaggtgtttctgaatttcctcaacgaactctccccgtcgctttaactgctcctcaaagctggtgagattgttaaagaacaacaccattttggcctctgacttgcccttgagtgcagtgtgttcatcataggagccgcccatcacaaccctggagaccctcacaggatgggcggcaccttggaagcatctctccttcaggaaagcacttatggagtcgatgtctgctctgagctcagtaaggaaggtggtgtcaggaaagaggtaatcacatatgaactcgtccagctccctggcttggatgctgcagagaccattctccatcctgaggccaggagtgtttgcggatagtcga

SEQ ID NO: 1850 - DNA, 709 bp, Mus musculus
  misc_feature (1)..(709): N IS G, C, A OR T
caaacactcctggcctcaggatggagaatggtctctgcagcatccaagccagggagctggacgagttcatatgtgattacctctttcctgacaccaccttccttactgagctcagagcagacatcgactccataagtgctttcctgaaggagagatgcttccaaggtgccgcccatcctgtgagggtctccagggttgtgatgggcggctcctatgatgaacacactgcactcaagggcaagtcagaggccaaaatggtgttgttctttaacaatctcaccagctttgaggagcagttaaagcgacggggagagttcgttgaggaaattcagaaacacctgtgtcagctgcagcaagagaaaccatttaaagtgaagtttgaggtgcagagctcagaggagcccaactccaggtctctgagcttcaagctgagctcccccgagctccagcaggaggtggaatttgatgtgcagccagcctatgatgtcctatatgaactgagaaacaacacgtatgctgaaccccaattctacaacaaagtctacgcccaactcatccatgagtgcaccaccctggagaaggagggcgatttctccatctgcttcaccgacctccatcagaacttcatgaggtatcgtgcgcccaagctctggaacctcatccgtctggtcaagcactggtatcanaaaaaaaaaaagggcggccgcac

SEQ ID NO: 1851 - DNA, 783 bp, Mus musculus
  misc_feature (1)..(800): N IS G, C, A OR T
attagctcctggaaagccagagagagctacatagttggatccagtttcaaccccccctgttccctaccaagggaaaggaaaaagaagctggagaaagaggggctgggagtttttacaggtcagagatcagggaggggtgaggcaaagcaatggcttttggagtggacaggacagaaccggtttgcctgtgaactctgcagctatagtgtggtcgcctgtgcaagagcaagccagtcaatattctaatgtggacacaagggctcccagcgctagctaaggagctattgatggctgcgtccagaaggaaagttgagttttcttcagtggtacaaccctggttaaccagggctaagtggatagccatattatatgtatctggctagcagcaactggactcaatgggttgtgaaaaaaaagtaaataaataaagagagaaaatttgggacaaaggggatttggaagtggctggaggtgcagtgcagcatgaatgtaatcaaaatatacagtatatacatgacatattcaaagagcaagtaaaaaatcataaaaagcaaatatacacgtatatcatattatttctaaaaatatattttaaaagttattaaaaagtaattaaaaagttactangaagtatcacagctttttccttgtatcaaaagctgggccaccatcctggtacttgtggattaactaggcagtccagcaagtcatctgtggacacgagactcgagaatgcgcataggaccctcggggtcaagggctcgtcaatgcgctcgccctttg

SEQ ID NO: 1852 - DNA, 696 bp, Mus musculus
tcccggtgagccctctcacctggcgctctctccatcctcggcgcgataaccatggcagcaggctgcgagggcatcgcgcccccgaccctgggcgagagaactgtgggggaggaaggtgaacctgtcaaaccttttacaccagagaaagcgaaagagattataatgtctttacagcagcctgcaatcttctgtaacatgattttcgattggccatcacgacactggactgcgaaacacctttcgaaggtcttggagggcaagcagatacggttcagaatgggcctgagaggcacaggcacagttcctcagtatgaaaccgaatgtagttatgtggatgcgacgctcgaggagtttttgacctggaactgtgaccagtctagtatctctggaccattcaaagattatgaacattctaaattctgggcttacgctgactataagtattttgttactctgtttgaggacaagacagatgttttccaggaggtggtgtggtctgactttgggtttcctggaagaaatggacaagaaagtacactgtggatcgggtcctttggagcccacactccctgccatctggactcctatggttgcaacttagtattccaggtacaaggaaggaaaagatggcatctctttcctcctgaagatacgcctttcctttatccaaccagaattccttacgaagagtctagt

SEQ ID NO: 1853 - DNA, 541 bp, Mus musculus
atttcagatgtatgagggttttgcctatgtgtatatatgtacactacatgtgtgcctggtgccaacaaaccctagtttcaggttcccaggaagtaaagttcagatgttgtaagacacctggaattaaacccaggtcctctgcatgagcagatgttcttaaccctgacccatctctccagtccctcacgaacaaattcttaaaaagtactatttgtaacatttatataggcctcaccattttctgtgtaagagtttacactgattaactacctcaaaaatcatcctatggagacctaaggatcagcaaatgctcacaactttgtagatgccttggtctgctagtttgttccttgagtaaactgcaaagccttcccagctcacactacagcagaagaaattgagctgtaggagcatggagctataaccaatgcttgttttgttatattgatagctaaacagaatgtttgtttctctgattaatctatgcctagggaatattttattatggggggcatagcaaataatgtagttcaatttcagt

SEQ ID NO: 1854 - DNA, 629 bp, Mus musculus
cggcagcagccgtggagtctgcggcgggtccgggcccatgaggcgacgacggaggcgggacggcttttacctagcgcctgacttccgacacagggaagctgaggacatggcaggagtgtttgacatagacctggaccagccagaagatgcaggctctgaggatgagctggaggagggggtcagttaaatgaaagcatggaccatgggggagttggaccatatgaacttggcatggaacattgtgagaaatttgaaatctcagaaactagtgtgaacagagggccagaaaaaatcagaccagaatgttttgagctacttcgggtacttggtaaagggggctatggaaaggtttttcaagtacgaaaagtaacaggagcaaatactgggaagatatttgccatgaaggtgcttaaaaaggcaatgatagtgaggaatgctaaggacacggcccacacgaaagcagagcggaacattctggaggaagtgaaacaccctttcattgtggacctgatttatgcctttcagaccggaggaaagctctacctcatcctcgagtatctcagtggaggagaactatttatgcagttagaaagagagggaatattcatggaagacacagcgtggtaagt

SEQ ID NO: 1855 - DNA, 642 bp, Mus musculus
gcattgaaaatgatttaatgccatttgtactttttcactatgagattagatttgctcctgtggttatttgctgatacaggctcatctgtctcagagttagtgtgaatgaaggaacttaagaaagatcaggacaggcacagctcactagtcgctcctgaatgcctcgtgacactgggaacatcctctcaagggttaaacagactgacacatgagctgagaatttattttttaagcaagatgaaaggggcagctctaagaaagacaggtcacgggttccctgataagtttctgagttcagacaatctcagttctcatccactgagactcctgtgccctcagaaaccttcccggcccaccacagaggctgttctaactgggtgctgggactgcacaaagccctgcagctcacacgactgctgtttcccaagatcaactggtctcctataagcagttcttgtatttttattcacacaggtctgattaagatgaattccaatggaactcaatgtgaatcacttcctggctgaagaactgacctacagaggtgtctgtgtggtgatcattgtgttggctgactgtcaccagcgtccagggctgtgctgactgacaagggagactttgcacaacacagcatcagctgaa

SEQ ID NO: 1856 - DNA, 636 bp, Mus musculus
  misc_feature (1)..(656): n is g, c, a or t
agactctcctgactctgggactcctcctgctttctgtcactgctcaggccaaggtctatgaacgttgtgagtttgccagaactctgaaaaggaatagaatggctggctactatggagtcagcctggccgactgggtgtgtttagctcagcacgagagcaattataacacacgagctacaaactacaaccgtggagaccaaagcactgactatgggatatttcagatcaatagccgatactggtgtaatgatggcaaaaccccaagagctgtgaatgcctgtgggatcaattgcagtgctctgctgcaggatgacatcactgcagccatacaatgtgcaaagagggtggtgagagatccccaaggcattcgagcatgggtggcatggcgagcacactgtcaaaaccgagatctgtcccagtatattcggaactgcggagtctgaccgcggtgtgcttctactgcagctcattcggtctctttctcactgtaggagtagatatgagagaggtcacattccctcgatttcccctctaagtcacaggacttcagcagaaacagggcaaaacagagacttcctcctcacaagcttcagctgatgctgtgttgtgcanagtctcccttgtcagtcagcacag

SEQ ID NO: 1857 - DNA, 597 bp, Mus musculus
gcagacatttattttcatgattataacacttgaaatactgcaggaacttcaagatgagggggttcctgcctgtcatctcagcatttgggaagtagaggcaggaggaacctgagttcaaagtcaaggacatccttggccgtgtggttatttccagaacagttaaagctagagagaccttgtctcaaacagaaaggaagtaaaataaaaataaactatcacaggaagatggtggtcaagtgtcatgtccgcacccccccccccccgtttcccagttattttagtatttgatcatgaagactacacatgaagtccgaatgattcaccaaagtagcccctcagttaggtggctaagtcctgttaaatactgcaccatacacagcttcacactgcagacagccattcagaaggactgcagcatgggacacctggcctgggctgatgtcagagacaagagtgagagcttcttcagctgtcgcctgcaccaggatacagacagacctactcctcagctgtgccttccaggacgtgcttaaaggagaagggggagaacttggagccagccccctcatagaacttgttctggaattccacccaatg

SEQ ID NO: 1858 - DNA, 624 bp, Mus musculus
acatccctccatggcctctgtatcagctcctgtttgagttccagtcctgacttcctttggtgatgaacaacagtgtggaagtgtgtctctaggttgtgtcaagacgacagtgagaaccagcacagacatccctgactaaggctggaccaacatggcatctgtgtttcgaagtgaggagatgtgtttatcccaagtgtttctccaggtggaggctgcgtattgctgtgtagctgagctgggagagcttggcttggttcagttcaaagatctaaatgcaaatgtgaacagcttccagaggaagtttgtgaatgaagtccgaaggtgtgagtcactggagagaatcctgcgttttctggaagatgagatgcaaaacgagattttaatccaagtgcctgagaaggatgctgagacccctctccctcgggaaatgatcaccctggagacgactctagagaagttggaaggagagctgcaggaagccaaccagagccaccaggctttgaagaagagctttctggaactgacagagctcaaatacctcctaaagaaaacccaggacttttttgagacagaaaccaacttaggtgaagatttctttgttgaagacacttcgggtctcttgga

SEQ ID NO: 1859 - DNA, 711 bp, Mus musculus
gggtcttttaaaataacaatgtaaacaagagtctacatttgtatatgtttatggtttaggttccttagctacataaaagagaggcaggaacatgatatgtgggagtcactataaggaaatccattatttttgctgataggaaaaaaattaaatcttgaaaataaaatggaaaaaaaatagatgtttaaaaacacatctagtcaagtcttaacaaacttctaacattaaacacataaattcagggaaattacaacttaagatttgttgccatggacaacagatgatggacagacagcttcctggacaaagagcagagagaggctggggcagtggcggaatcccaggagtgtatttacctccggggtgagagctaacaagaattacggtggagatcgaaaataatggcgtgtgacagatataaatgacatttcctcgattctaaattgcatattagctcggtatcaaactaaggatggaaacggtagaatatttcattttccaggtgtgggtagagaatggccatagtacactttaattctctagctgcattgtacagtgtaaggcagaagtttgaaatacgttccatcccaaatgcgtcatgactctgtaaatctcttttttaaaataaccagtctgaaaaccatctgaaaagaaaggccttttttttttttttttgcttgattttaattcctcaaatttagttttctatca

SEQ ID NO: 1860 - DNA, 617 bp, Mus musculus
tccagagattttatctttaaccagacagtgttagacaagcatgtgacctcgtcttgccgccaccatgtgatataaagaggagcatgattttttctttcctgtaagttacatcatgagcagcagaaggtcgtcttcttgtaaatattgtgaacaggacttccgagcacacacacagaagaatgcggccacacccttcctagccaactaacactgcatccttggacgaacggtgcccaagttcattttgctgtcctcttgactggatctgtcacaagccaacttggggtccctcagcactttgccctgatttcggatcctgagtaacagataccactgaattgctgtaacaatggggtgacacctttgggttttagtttttcataacactgagcctgttggttgacaaaacttggctgttggcgtcggtacagacaccagccaccgagctctctgacacatggacactggttcacatctacagctatttgaggtgccgggcaaaggagaactttaaaattgatagaaaactaaatttgaggaattaaaatcaagcaaaaaaaaaaaaaaaaggcctttcttttcagatggttttcagactggttattttaaaaaagaga

SEQ ID NO: 1861 - DNA, 318 bp, Mus musculus
gagaactggaatggtgaactctgaaagaagttgtggctaatcttgaggctggagccattgtggacaccctttgtggccaagccaagagcagctggagccagtacataggtacataatccacagtgccgttgtgaccacgccctccagggtggagcccgtgacctatatgcaacctttccactcttctcccaacagtccctccttctctgggcccttcctcttctgaggactccagagctgctccaggttagccaactttggtgccagagtgcctgttagagtgacgtttcgttggtgtgcggcctggaattctcttcc

SEQ ID NO: 1862 - DNA, 477 bp, Mus musculus
tcctgctggccctggctgagagcgagcagagcctcatcctggggcaattccgagcagctggtgtgggctcctcccctggagaccagtcaggggatgaaaatatcactcagatgctcaagcgggctcatgactgccggaagactgctgagaacgccgccaaagccctgctcatgaagctggatggcagctgcgggggagccttcgccgtggctggctgcagcgtgcagccctgggagagcctgtcctccaacagccataccagcacgaccagctctacagccagcagctgtgacacagagttcactaaggaagatgagcaaaggttgaaggattatatccagcagctcaagaatgacagagccgccgtcaagctgaccatgctggagctggagagcatccacatcgatccactcagctatgatgtcaagccaagaggcgacagccagaggctggacctggaaaatgccgtgctgatgc

SEQ ID NO: 1863 - DNA, 565 bp, Mus musculus
aagacatctaaaagcatttattttatgcaaaaattaaataggattatgtgcacagaaatactgtacacagtatctatgctgaacaatgaatgccaaggaatacaatattgtaacagttgtctgtaaaataaaaataaaaactgagccccaattatcagacaaaaataaaaggcctatttcccaacagcacggtgccagacgtcgagagcatatctctgtccctcacaaagctgccagtgtccatctactgatagttccaaaaaaacaaaacaaaccctaaaaacaaaaccaacctttttttacattaataataaaaatctggtgacaattataaaaccaaatcctggacagtctttactccctgaaaacccaattattccatcataatcacaggagtaaaaaccattctaaactgatatgccttatgaaacaatatgtacatttattgcaaattatattaaactaaaatgggagaaatcataatatgaagtgtttactacttgcagatcaataattttaattattttctcattctgataaaaatcagaaagcaacatttataaaa

SEQ ID NO: 1864 - DNA, 580 bp, Mus musculus
aaagcgcccaagctacaagatggagccaaaaaggcagttccagcagagagacaaattgatttacaaaggtaaaaggagaaaacgaaggccaaacagaagcagagtccaggttctgtaaaaacttggattccaatgtccccaaacagaaaacgaagctcacttcaaatacacactttctgccttgaaaactgaacgaagctagccttcctttttacacagcctaagtcctctggtgaaatgtacagcagactctagagaggctaagagcatctctgttcctcccctcccccagacttttcctgggaaaagtcaataattaagcaaattgcttaacacttggttccaggtcctgcatatctggaacttaaaggcatagtaaccattttttccatgctgcagatttcattttagagaggaacagggcgtccattcactgatgctgagaactggtccatcctagagcccagaaccccgtgccacacaggcgagcaggtgtctactgaactgaggctttacaagcgagagagcagatgacatatttcttcgttttccttttggaaacttatgtattattctttct

SEQ ID NO: 1865 - DNA, 586 bp, Mus musculus
  misc_feature (1)..(586): n is g, c, a or t
ccacttaagcttccagagctacgaggcctatcatgctgacaaataccacaaggataagaacccttcgggctacatcaaccttagtaccagcgagaacaagctttgccttgacctgataacagcgaggttgactcagagtgacatgaacttactcgatgaggcccagctgcagtactccgactggaaaggacaacccttccttcgggaagagctggctagcttcttgacccactactgcaaggcgcctacaccccttgacccagaaaatgtggtggttctaaatggctgctcctcagtctttgcttcactggccatggttctgtgtgacccaggtgatgcccttctgatccccacaccgtgctacaatggctttgtcttcagctcccacctctattccaaaatcgagcttattcctgtccacttggagagccaggtccccagatccaacttggattctttccaactcactgtggataagctcaagcttgccctgactcaggctaagaagaaggcaaaaaaggtcaaaggccttgtgctcatcaacccccagaatcctctggngtgatgtctacactcagtcgtcact

SEQ ID NO: 1866 - DNA, 541 bp, Mus musculus
ggagaaaatagagcatgacttttattaaatggtgaatgcaaaacaaagccatctaaaaaggaatccggggaacagcctttacctctccagggttccttaggccttctccctcctactacaataaaaacatcattttgagcacagtctggctagcgaagactaaaagaaacaaggcttctaaaaatgtcagacactcagcgtaggggactcgatgagtgaggtcagacagcacggtgactccaattcctcctcctgtctcctggccacgaggttactttcaggggcccctgagcaagtgacagcaggctctctggagccactgggtgggggcagcagtctatgtcctggctgcctgctcctgctgtttacttttcatgctttttgtgttcagcaagcacgtggcagaaccgatccatggccacttgtaggtgaaggtgggtttctgcaaagacgagtcggaaccagccaggctctatacacatgtaggatttgccactagataataacagcttcttgtcccggaagcgctggtgaaggatct

SEQ ID NO: 1867 - DNA, 299 bp, Mus musculus
gggttggtttttttttttttttaacgatagacttgctgcacagattttattgaaatatctcttcctatccccatgggggctttgcttccactgggaagcctgcaggtgccatctacgggccgcgggaactccatattattgttctgcccggtaagattgccaaactgccacaccgcgatccaccatatggctgctcaagcaactctggatgaccggttggtggtccaggtgatggggcttctgtccatcacatccaggctctgcggaggttcacacaatcctttgtccttgctcctgag

SEQ ID NO: 1868 - DNA, 601 bp, Mus musculus
tcatgagctgtcagggtgcctcaccatccttcaaagttccacatctcctggtttaccagcctcacaaattgatcagggtcctctctgaggagggatattgatccattgttctcgaactctctgatctctctgaggcctttgtggtgggatctgagagtcaggtttagattctggacggggctgtaatactggcactttgaccacatgaggtggtgtccctgtcactggaacagccccactgggaggtagttcttactagtcacagatgccaaaaataaaatgccctcacgtcctcctgtgctgggaccatgtctgccagggcctaagaagcgctgttctgcgcatcctcaggagcagcttcttccaatgcagcctcaggtttgtcctcttcaatgtcggtcgggcacaagttctggctccgtctctggttccagttccacagcagggtcctctaaatgttcctccaagtcattactgacagtctgatcatagaaagttcaggaatcaggcaccacctctggtgtcttctgtctttctttgggttcctctacgtcttcctcggattcctcttgaggatctgtgacaaagccactgaagagct

SEQ ID NO: 1869 - DNA, 490 bp, Mus musculus
cagatcaccaggaattcttagtagggttcccatggggagctgctggcccagggggcattttccacgctttgcccctctgggtcctgggctctggggctactgggaggatgccttgggggccagagaggccacacagtgctgctggaagctgggtgatacgccaggggtgcagccaagtctctggtgcggcagcttggcggaagcaccagcgcccatgttgcctgcttcggtctcagtcttccagggtgtgtcctggcccttcatgctgccacagcagccagggctggcactgcacgtccgttccccagccaggctgcctgccggttccgccaggagcctgttgtgccttagcggggccacttcctccggggcagctcctcccgtgctctggccttgcagaactgtggcaatggttcaggaggtcggtaaagaactcactcactccttcatagcctgggaaggcattgacatcgatgactgcatgctgccc

SEQ ID NO: 1870 - DNA, 591 bp, Mus musculus
  misc_feature (1)..(591): n is g, c, a or t
ttccaagagtacatcgatgctcaccctgagaccatcgtcttggatcccctccccgccatcaggaccctgttagaccgttccaagtcctacgaacttatccgaaagatcgaggcctacatgaaaggtgacagaatctgctcgccgcctttcatggagctcacgagcctgtgtggggaggacaccatgaggctgctggagcagaacggcctggccttccccttcatttgcaaaaccagagtggctcatggaaccaactctcatgagatggctattgtgttcaaccaagagggcctgaatgccatccagcctccctgtgtggtccagaacttcatcaaccacaatgctgtcctgtacaaggtgtttgtggtgggcgagtcctacacagtggtccagagaccctcactcaagaacttctctgcgggcacatcagatcgtgagtccatcttcttcaacagccacaatgtgtcaaagccggagtcttcatcagtcctcactgagctggacaagatcgaggggtgtgttcgaacggccaagcgatgaggttatccgggagctgtcccgggctctgcggcaggcgctgggagtgtcact

SEQ ID NO: 1871 - DNA, 597 bp, Mus musculus
ctatcacaatcatatttattaaaataattgttttcaagtttgaactctctcactttcatcctggttaaatgatatagcaaatactatacagagatacaagaaagtggtaacaagaaaacccacatggaagcacatgtggaagacgtggaattttctagggtcttggaatctttaaaatggtaccttaggtgatcttaaaaaaatattcagattttctttttgagctgtctccttttggttcagagtaaatgaaccaaataatagccaggagtctggctactaccagtttcaagaggtagcaaatgtgctttctgctagttgggccttgtcagctgccttaataagattgctatagtccattccatctgcctttggtgatgaccagaactctatggcccagaaagtgaggcttcttgcaattactacttgagatccatgaaccggatatccatgatgagaagaaagttcttaggcaatgggcggggggctggagacaggacagtaaacacttggtgttccacatccacactggtcacaacaatgaatccagccacactggtctcagaaaggttctcttctgtgccctcagcagtgctc

SEQ ID NO: 1872 - DNA, 520 bp, Mus musculus
  misc_feature (1)..(520): n is g, c, a or t
tcaactacgcagtgcgtttgggccgccgtcctacttacgtggagttagatgtaggccagggctctgtgtccatccctggtaccatgggggccctgtacattgagcgtccagcagatgtggaagaaggtttctccatccaggcccctcttgtgtatcattttggctccaccacgcctggcaccaacatcaagctttacaataagattacatctcgcttagcagatgtgttcaaccaaaggtgtgaagtgaacagaagggcttctgtgagtggctgtgtcatcaacacctgtggctgggtcaagggctatggttaccaagccctggtgcacgcagcgtcggcctttgaggtggatgttgntntgtggttctggatcaagagcgactgtacaacgaattgaaaagggacctgcctcattttgttcgaactgtgttgcttccaaaatcagggggtgtggtagaacgttccaaggacttccggcgggaatgtagagatgaacgtatccgtgagtatttctatgga

SEQ ID NO: 1873 - DNA, 612 bp, Mus musculus
gaaggttcatacacgttttatttctttttctgttgctgtgcctcttctataaccaacccctggtaactatgtttattaaaatgcccttctccatcctctgcttctgagttgcttttctcagtcgtggcctgttcttttcttggatgaatgttctggaacatagggaactggaagtgttgagagactattgggtgacatgctcattcttgggtttcaaagctgatttggcttttctcttgtgtttatgattcacatgtgttgtgttttcagaagttcaatcaaatgttatctaatttccagggttgactgagccattcaggtctccaaaatatttaggagaactggagcctggctggtggtgacagtatctaataggtgtaggaggctgtgaagagcgactgggtggcagcagcacctgaagagcctgtgtgaacgtactgtccttgggccgcctggcagttagccatagcccgcttcatgaaagcttcctgggttgccttcttgtttgcagccttgccaccccaggcagccaatgcactggcctggagggctcttccatatgaaaagcttagtttccagggccttggtagagggcaacggttgatagcattg

SEQ ID NO: 1874 - DNA, 608 bp, Mus musculus
cggctgccacctcacacagcttctgataccttggaggactcttcccctttgctgtacctgtcatcatggctcaccgatttccagccctcaccccagagcagaagaaggagctctctgaaattgcccagcgcattgttgccaatgggaagggcatcctggctgcagatgaatctgtgggtaccatgggaaaccgcctgcaaaggataaaggtggagaacaccgaagagaaccgaaggcagttccgagaactcctctttagtgtggacaattccattagccagagcatcggcggagtgatccttttccacgagaccctctaccagaaggacagccagggaaatctgttcagaaacgttctcaaggagaagggaattgtggtgggcatcaagttggaccaaggaggtgccccgcttgcaggaacaaacaaggaaaccaccattcaagggcttgatggcctctctgaacgctgtgctcagtacaagaaagatggagttgactttgggaagtggcgtgctgtgttgaggattgctgaccagtgtccttccagccttgctatccaagaaaatgccaatgctctggctcgctatgccagcatctgtcagcagaat

SEQ ID NO: 1875 - DNA, 530 bp, Mus musculus
cacgacgtaagtcacttttaatatttaagtcatttaatcatgcatctatacacacagtaaaaattaaaactatgtgtattatttaaaaatgatctataatgtttaaatttccctgggcaactaatgattgattcgacatttacttagatcatattgtctgttattctctgtacgttatatacgtattttaaaggaatattacctgtagcaaaaataattaaaaattcaaatgaaatttgaatatcctataaacatttgctattactaaatttaatagatctcacaatagtcaaacaataaacttagctatttgaaacataaattatgactgaataactctgtaagtcacatgtgtaatttgaaatgtagaaattataggtataaacatgaataatataatgagttatagttctatacaaaatgatctcttaaaagataaagtaacaactttataatcaatcttacatttggctcacgagaaagcgttctctagcgttacaaatccaaaaccaccacagagaacatgatat

SEQ ID NO: 1876 - DNA, 596 bp, Mus musculus
agctacttccggttgcagtcattctgccgggcaccggcgacctgtggcgtgagcgagcacagccggaaccctccactagctggcattcctaccatcctttatagtgatgctacaggacaaagaggaatggataaaaacattggtgagcaactcaatagagcatatgaagccttccgacaggcatgcatggatagagattcagcagtaagagagctacagcaaaagactgagaactatgaacaaagaatacgcgagcaacaggaacagctgtcatttcaacaaaacctaattgacaggctgaaatcacagctacttctcgtggattctagtcgagataacagttatggctatgtacctttgcttgaagacagtgacagaaggaagaataatttgacccttgatgaaccacatgataaagtgaaactaggaacactgagagataagcaatcaaaggtgagacgacaagaagtttcttctggaaaagaatccgccaagggtctcaacatccctctgcatcacgaaagggataatatagagaagactttctggggccttaaagaagaatttcataggatttgcttgctagcaaaagcaca

SEQ ID NO: 1877 - DNA, 549 bp, Mus musculus
attttgacttgttgtattcactaatccgaatacagagggtgagtttagagagattgctggatcaggtttgaggaagtgacaggtcagctgaggtccgaacataaaaggagacacatggatttagagagaaggcattccaggcagaggaccatttggtaccagagccaaggccttgtcagccttttatgtaatgggggggcaggtcaaccatgtcacccatccctgtccagttcatactgagtgagccaattggcagacatgtgacctacgcagaacaatcacagatctccagagttgttatggcagggacaggacagaatgggtctttctctgggattacaaatcttaggggttatttcagtgagggatcaagttgttggctgggaaggcttatccaacaataaagtctccccaaggccaaaagatcaaagcctttgacttggggacacacataattgacattaccaagatttaggcatgcgaaccagttcagtttctttttctattgacctgagtttcagtccctgcaaccaagagtacccagactca

SEQ ID NO: 1878 - DNA, 579 bp, Mus musculus
cggcggcgagcagcgtccttgagctgaggctgcagcagacacccaggagccgccactccatccagcagacttctctgtgttccactgccccgaccatgcaccaccagtctgttctgcacagcggctactttcacccactgcttcggagctggcagactgctgcctccaccgtcagtgcctccaacctcatctatcccatctttgtcacggatgttcctgatgatgtccagcctatcgccagcctcccaggagtggccaggtatggcgtaaaccagctagaagagatgctgagacctctggtggaagctggcctgcgctgtgtcctgatctttggcgtccccagcagagttcccaaggatgaacagggctctgcagctgactctgaggactccccaactattgaggctgtccgtctgctgaggaagaccttcccttccctcctagtggcctgtgacgtctgcttgtgcccctacacctcccatggccactgtggcctcctgagtgaaaatggagcattcctagcagaggagagccgacagcggttggcagaggtggcactggcctatgccaaggcaggct

SEQ ID NO: 1879 - DNA, 653 bp, Mus musculus
gtaaaaactcctctttatttcctgtctgaattttagggttcactaggtattgtcagaagatcctctttgacaaggttaaatgttcttgttttatttagttatttaggtgtgcgctcatgtgtgtatggaagcccaagcatatacagaagtcagggatcagaggtcaaccatggctatcgcttcttaggaacatataacttgattttgacacagctcactcattgacagatacttgttcactgaactatattggttaaccagtaggctctagggttccacctgtctctgtctctctagcactagaattacaagtgtgtcagcatatctgtcttgtttttctgacacagatcctgaagtctggcctcaggtcctcttgcttgcacagcaagcaattggcaggtgatgaatcttcacactccctcgactgatttatacatgaaatattttcattgattttttttttctccataaagaagtacgtccatggagcataaatgcttctaagggaagaagtaggtgacaaaaattcttgtaaacacacatagaaagactatggtactgattacataaacatttatttaaaactctttgtaaaaaatttaactaatttttttgccatattttcatgtgacttacataatttaaaaacgagc

SEQ ID NO: 1880 - DNA, 594 bp, Mus musculus
  misc_feature (1)..(600): n is g, c, a or t
tagaagcaagaattcgtatattaaccaacaattctcagacaccaatcctgagtcctcaggaggttgtatcttgcagcccctatgcccaaggttgtgatggtggattcccatacctcattgcagggaagtatgcccaagattttggggtggtggaagaaagctgctttccctacacagccaaagattctccatgcaaaccaagggagaattgcctccgttactattcttctgacttactactatgtgggtggtttctatggtggctgcaatgaagccctgatgaagcttgagctggtcaaacatggacccatggcagttgcctttgaagtccacgatgacttcctacactaccacagtggaatctatcaccacactgggctgagtgaccctttcaaccccttcgagctgacaaatcatgctgttttgcttgtgggctatggaagagatccagttactgggatagaatactggattataaagaacagctggggctctaactgngggggagagtggctacttccgtatccgcagaggaactgatgaatgtgcaattgagagtatagccgtggcggccataccgattcctaaattata

SEQ ID NO: 1881 - DNA, 695 bp, Mus musculus
ctctaagcttgaatcttctcaagcgtgcaaacacagttacggattgttctgggagctaaatggctcagcatcttggcacttggttgtttttagcttttcaacaatagccactgttcgctcccctccatctccatccctctgtgatgaggcaggcatccgatgaaaggctggtcacggcgtgcccccatggtgtcagtgcggtggcatgtgatggttcacatggggtgtgtttgatccaagaaagcccagcctttgcttgtttttcctttgttctgtcatctgctccttcagctctgccagctgccctgacagctgcttcaccagactcatcgtagactccagcttctcctgcaggttccggatcccattttgctcactgtcaccttcgttgctgacaagtgacatggctcgcatccgaggaaaccagtccaaattcttctccgtgatcatctgagccacgtagctctcaggccctgtgtattctgtcgggtccttcaccttcaccaggacgatgaagtacaggtaatgccacatgttgtgctctgacttgatgtgctcctcaaaggacactgtcttgttatcaaacttgtctctctccaggccaaagcaatctggagaggaaagggttgattcggcttccacaccattgtctgtcattgaaggaagtcagggcaagaacctggagggatagtcga

SEQ ID NO: 1882 - DNA, 576 bp, Mus musculus
tccaggttcttgccctgacttccttcaatgacagacaatggtgtggaagccgaatcaaccctttcctctccagattgctttggcctggagagagacaagtttgataacaagacagtgtcctttgaggagcacatcaagtcagagcacaacatgtggcattacctgtacttcatcgtcctggtgaaggtgaaggacccgacagaatacacagggcctgagagctacgtggctcagatgatcacggagaagaatttggactggtttcctcggatgcgagccatgtcacttgtcagcaacgaaggtgacagtgagcaaaatgggatccggaacctgcaggagaagctggagtctacgatgagtctggtgaagcagctgtcagggcagctggcagagctgaaggagcagatgacagaacaaaggaaaaacaagcaaaggctgggctttcttggatcaaacacaccccatgtgaaccatcacatgccaccgcactgacaccatgggggcacgccgtgaccagcctttcatcggatgcctgcctcatcacagagggatggagatggaggggagcgaacagtg

SEQ ID NO: 1883 - DNA, 527 bp, Mus musculus
ctattccaaagcattttattgttctttaaaaagggagtgtgcacggctgacggccatgacctctgactccagtccgggcacagtgccagaactccaggagcatctgtctcaacagcctctgcttctcagtcccctcctggccagtcccaaagcccggctggagcttccgtcttcctcctaacaacactcaaaagcagcagtgactgcacccgtgtacatctaagccccaataattcaaaggttatatggttatgcacatttaaaatacatagaaaaataataattaggatttatacaaattagatttttacaaaacatcaattactacaagaaatacatcgtctatccaagcacaaaaatgtgaacatatgcatgtggcagaggaggtgagaaaagacatttatttcagaagcccagtggggaggcaggggaagtgggacagtaatcgactggtcccacgagggaggttgaatttgccagcagaagcctccgaccgaccgttcccagcttctgcgctgctcccgagg

SEQ ID NO: 1884 - DNA, 597 bp, Mus musculus
gaaggcttgagtctgggccgcgggccagaggccgccggaagtgctcagcgttgttgacggaagtagagagaaggctgtaatggcggctgtgactgaagttgtggtccccgcggatggcgcggaagccaggcccttggcggccgaggagctggcggcgcagaagcgggagcagagactacgcaagttccgtgagctgcatctgaagcggaatgaagctcgtaagctgaatcaccaggaagttgtggaagaagacaaaagacttaagttgcctgcaaactgggaagccaagaaagcgcgtctggagtgggagctccaggaagaggagaagaaaaaggagtgtgcagctcgaggggaagactacgagaaggtgaagttgctggagatcagcgcagaggacgctgagaggtgggagaggaggaagaagaagaagaaccctgacttggggttttcagattatgctgctgcccaattacgccagtatcaccggctgaccaagcagatcaaacctgacatggaaagctatgagcgacagagagagaagcatggagaagattttttcccaacatccaacagtcttctccatgggacgcacgtgcc

SEQ ID NO: 1885 - DNA, 596 bp, Mus musculus
cttaaacactgatcatgactttatttaaaacttagcagacaagactgcagaagaacatccacgtgtcagggtctaaagctgcatctcagattttagttggcaaagaccacatttagcaaatcaactttttagtcttccacatacaagccagatacgtactaaaactgtaaaaaaaggagaaaaaatagtttcctattgttcgaaaataccagtttatgtgtaagtgtaaaaaaatgcatagatagatcttcaacgaaagagctggctgtcctggagaatcgctccgccctttccatggtacagacgcgagttactggctatgcagtagggctcccttgctacagcactagaaggcagctatttagggaggaggcaggaaaaggagaaaggaatgtacataaggcatactttaaaggtacaacaagcataatagtgtttcaggaagacgagagaagaattattcaaggctagcttgggtctcactggataaaacaatggactaaatactgcgctcctgtgtgtgactctaataatcaatgccctggtcggcgccatactggtactcccgagggtagtcgtctgggtactcgccatga

SEQ ID NO: 1886 - DNA, 588 bp, Mus musculus
accaacaaatgtgccagccgggcgggcatgacagcctatgggactcggaggcatctttatgatcccaagatgcagacggacaaaccctttgaccagaccacgattagcctgcagatgggcaccaacaaaggggccagccaggctgggatgttagcaccgggcaccagaagagacatctatgaccagaagctgacattacagccagtggacaactcgaccatttctctacagatgggcaccaacaaagttgcttcccagaaaggaatgagcgtgtatgggcttgggcggcaagtatatgaccccaagtactgtgccgcacccacagaacctgtcattcacaacggaagccagggcacgggcaccaatgggtcggaaatcagtgatagcgattatcaggcagaataccccgatgaatatcatggcgagtacccagacgactaccctcgggagtaccagtatggcgacgaccagggcattgattattagagtcacacacaggagcgcagtatttagtccattgttttatccagtgagacccaagctagccttgaataattcttctctcgtcttcctgaaacactattatgc

SEQ ID NO: 1887 - DNA, 611 bp, Mus musculus
cagtgcaaacctggttttattggtctgacttgttcacagctcctcctcctgctcagggacccagaaccaaggcccagctaactcagggaggggacaaggaatagaagggacagatttaggctatggggtgggctctgttcttcacagcaagaggtagaaggaccacataaagttctttattagagacctacaaaaaaatgagagaattatacattactctcacttgttcggcttctggtttccttttcaagcagaggcaggagaggaaatgtgccagaggctgatgcatgggggctggggcttcagagggccacagagatggggactgggcgaccactagtgcggtcaggctacaggctggcccaggctttctccagcatctaggggaatggcaacaagccccggaagaagcacacagtaggtgcacaagaggagcacacagtagggggtgcacaagaatgacccccacaccagtggcagcactggccctctccaggccacccgggctgagggctggctctgaagtgctggtggctcttaggtttggagggtctgctgtcacaggcaagacccaccaggataaaacagaggggcagggcaggaaggatgac

SEQ ID NO: 1888 - DNA, 571 bp, Mus musculus
catccctctgctcgcactgccgggagatggctcagcggctcctcctggggaggttcctgacctcagtcatctccaggaagcctcctcagggtgtgtgggcttccctcacctctaagaccctgcagacccctcagtacaatgctggtggtctaacagtaatgcccagcccagcccggacagtacacaccaccagagtctgtttgacgacctttaacgtccaggatggacctgactttcaagacagagttgtcaacagtgagacaccagttgttgtggactttcatgcacagtggtgtggcccctgcaagatcctaggaccgcggctagagaagatggtcgccaagcagcacgggaaggtggtcatggccaaagtggacattgacgatcacacagaccttgccattgaatatgaggtgtcagctgtgcctaccgtgctagccatcaagaacggggacgtggtggacaagtttgtggggatcaaggacgaggaccagctagaagccttcctgaagaagctgattggctgacgagcagagaggaggcctgactacccttgcctgctggaagtctg

SEQ ID NO: 1889 - DNA, 618 bp, Mus musculus
atctcctggagccttcagagaagctcgggagagcaaaggcgataggtgagtcctcaacagaacatgaacagttggcacataaactgcaggaaccctgggcctgctctggaggagaatcctagcaagaatcctaaggcactgtacttctgtagatgccgtggtgaggccaaagacctggcaccaccaagctgtttccatgacactgctctcggtggagtttagttctctcccagcccctcctctttgggcaggggaattttggtatctgatgcctctatcacaaggtcctggggtctggaggtagaaactgagatgcaggagaagaaatggggcagggtgagaagaactccacttcctgcgagtaggaaggccccggccaccacaaaagaagccgtgtagttgcctgtcacatcccggaggtagcctgatagaggagcccccagcagcccgccgatactctcgatcatctgcaccagtcccataccacagtaaatccttccagtccccaccagttcaggaagcacggagaaggccactggggtcagggctcctgatgtgaaaccataggccacagccaggactaccagggttgaggaagcctgagcaacaggaaacagg

SEQ ID NO: 1890 - DNA, 562 bp, Mus musculus
gccacatgctttatcagtaacttcctagctaccagccccagcttagcgctgagcgtcctgcagggtaggtgggagggccaaagtgagcgatttaaagcccagatcaggcaggggctcttaggagttgcccctttgttcctttcggaatggtgcgcagggctgagccccccgacgggggctggggatggatggtggtgctctcagcgttcttccagtcggcgctcgtgtttggggtactccgttccttcggtgtcttcttcgtggaatttgtggcggcgtttgaggagcaggcagccagagtctcctggatcgcctccatagggatcgcggtgcagcagtttgggagcccaataggcagtgccctgagcacgaagctggggcccaggcctgtggtgatgactgggggcatcttggctgcgctggggatgctgcttgcttcatttgctacctccttgacccacctatacctgagtattgggctgctgtcaggctctggctgggccctgaccttcactccgaccatggcctgcctttcccgttacttctctcagcgtcgatctct

SEQ ID NO: 1891 - DNA, 641 bp, Mus musculus
acgaccaaacatcacaaacactttatttgtggttaccagttatttttacagagaataaagaactcattaatttgtaacactgtacattaaattaaaatacaacccacccctacatcaaaaattatttaagttgaccaagataaaaaactgtctctaaaagcttatatacattagaagtagcaaaaataataataaaggaagagattagaaaacagccatcaaattcagacatctacaagaattctccaacatctgctctcttatctcggcatttgcttcgagcttttgttcgagctttgaaagctgcagagttatataaatgcctttcaaaacgagaaatcttcatggttttaagtgttgcagcatcaagcatcacagggggtccaagctcaaatacatttcgaaggaattcatttgtctgcaatggtactgcatccctgatccaagaacctctttaaacgtgtcataggtatgttttttgacccagctatcaatatacatgcgctcaggaccaaatttaacagtttctgttggaaaatcccgttcctccacagccctcagaacgtctctgaagacagaccgctgctttctcttgtccactttggcacggtgtttaatttcatctgtagcagagcccggag

SEQ ID NO: 1892 - DNA, 587 bp, Mus musculus
gggggtggcggcggctccggggcagcgacgtcggcggccacggcaggtggcccgcatcggactgttcaacctttcagtgatgaagatgcatccattgaaacaatgagccactgcagcggctatagcgatccttccagttttgcggaggatgggccagaagttcttgatgaggaaggaactcaagaagacttagagtacaagttgaaggggttaattgacctaacccttgataagagtgcgaagacaagacaggcagctcttgaaggtcttaagaatgcactgtcttcaaaagtgctgtatgagtttgttctcgagagaagaatgactttaactgatagcattgagcgctgtctgaaaaaaggaaagagtgacgagcagcgtgcggctgcagctgtcgcatctgttctttgtattcagctgggccctggatttgagagtgaagagattttaaagactcttggaccaatcctaaaaaaaataatttgtgatggagcagctagtatccaggctaggcagacttgtgcaacttgctttggtgtttgctgttttattgccacagatgatatcactgagctgtattcaactct

SEQ ID NO: 1893 - DNA, 594 bp, Mus musculus
gaagttaatctcttagaacagctaaacttttatttaaaaagcaaatcaagcatatttgtcatcttaaaaaaaaaacatgtaaacattgcaaaatttgtgagggttatttataatctgaagacacttataaaaatttttggacttgttaggactataaatactaaccctctactcccctccccccatgaaaaaagccaattgttacaaaaatataaaaaaatattctagcttctagttaacctttcatggaagaatctcagaactctggagcatatctggattatatgcctagcgagcacacatggtaccttttcagcttttaaaggaaaagctgtagaccatcacatcctgttatggatgcggctacttccttcacagtaatgcaatgcttgtgagtgttacaacttgaagttctgttttaaagtcgcaccccctgcagtgtgggactatagggcaggaggctggtttcagcttactccacagccttcacatctttctctctctggctccgaaaactcccttgactcgctgcgtgggtaccaggctcctgcgcgggagtccggacagctttcccactctcactgaagaacgaga

SEQ ID NO: 1894 - DNA, 601 bp, Mus musculus
gcagtggctttgggcagcgagaaggcacttaccacttcagaatgaccattctccctccggtggataaactgaagaccgtgctccacaaggtgaaagactttcacctgaagttcctggagcagtactcatgaggacgcctcaggcaccggagccagaccctcccaagaccacccaggccttcctcaaggactctgcctcagacctcagacaggccaccaacgctgttcatcttcatttccccaaggagacttctttctttgtgccttgatgtttgagagttcttcgagcaaacagtggttttgcaatgtctcacaggccctgtttttgtttttgtttttgttttgttttgttttgttccttttttaaatgcaaccaaagtagagtcaacctgctcggcagatgtacttggattctctgaatcgctattctgtttggagagttcctttgggtcttaagcagccagagtacatggaaatgagattatgtcagatctggagaaacaagcaggtgttgggaaatatgtgacttgacatgataagggctgggaatccagaaatcaatagtgagatccatgaaatcaaaccctgaccagtgtgaaaat

SEQ ID NO: 1895 - DNA, 795 bp, Mus musculus
gatgtgaagaaaattctttaattccatcttctatccctaactactaataaatcgctgatcaatgataaatgcaggcagagctccaattgttcaattagtaatcagtattaagatgtgttcctttgaaccaaggcctctgggtaagtgagaccccttcatggaatgagcgcatttttgaccgactctggaacatggcttgcatagtactcgtagttcctcagtgcagccaggacaccggcagagttcatatgtttcacctccttgttgtactgcagggcattcccatggatgtctgtcaacttccctcccacagcatgcaagataacttccggggcacaagtgtcccacttcttacacccaggacttgcaaacacataagcagaagctttgccttcgatcagctggataatcttgtttcctgctcctcccactcgcagcacggtgtcggggttcatggcggaaatgcagtctgtgaccagctggttgctatgggatctggtggttgtgataatgtgcttcccggcaggggcttccttcagctgaaacccaaaagcacccaaacccagaactccccagatggtcctgcccagcgccgcgtcgggtcctgcctggtagttgtaatacggctggttgatgatgcctgcgatggcctttccttcataagcaatcccaatgagaactgttacattgtcaagaagaccttcagtgtactccttggtgccatctaaggggtcaaccaaaccacaaggtcttcctccttgatagcactgtactgcgaggggcacggctgcttca

SEQ ID NO: 1896 - DNA, 522 bp, Mus musculus
cggttcccggacagcgagccaccaggccggacagcgcttaggggacaccaggctgagtgtttatcatggcttccagccacaccgtgttgatgcggctggtagcttcagcatattctatcgctcaaaaggcaggaaccatagtcaggtgtgtcattgctgaaggggacctgggcatcgtgcagaagacctcggccaccgacctgcagaccaaagccgaccgcttggtgcagatgagcatatgctcttccctggcccggaagttcccgaagctgaccatcataggggaagaggacctgcctcctggggaagtggatcaagagctgattgaagacgggcagtgggaggagatcctgaagcagccgtgcccctcgcagtacagtgctatcaaggaggaagaccttgtggtttgggttgaccccttagatggcaccaaggagtacactgaaggtcttcttgacaatgtaacagttctcattgggattgcttatgaaggaaaggccatcgcaggcatcatcaaccagc

SEQ ID NO: 1897 - DNA, 731 bp, Mus musculus
cccccctctgagacagagttttctctgtgtaatcctggctgtcctggaactcactctgtagaccaggctggcctcaaactcagaaatccatctgcctctgcctcccaagtaatgggattaaaggcgtgtgccaccactgcctggctctcattccctccccccccccccatggcagcttccatgctataatggcagaatctaggggcttcctcaggaatgaggtctgccaaagtctgaaatgtttgctcctaggctcttgagaacccccctttcgtgtaacttagagagcctgcagctgccctgtgcacagagcttcgccctggtctctgtgaaggttcagcgtcctccctctgcttcctcaggtttacgtgcggagaggctacatcgcctacgagctaaacagcctgcagcaccgggagctcccagatggcacctgtgtggtggagttccagttcatgctgccctcttcccaccccaaccggtagggactggttttccttgtttctttcctctctgtctcgtcttcgggaggatccagcaagtatgcgtggctgctgggcagaccccttcccagccataggtctcctgcagtcttgcgtgctcatctgtggaacgaggacagccacccagtgtcatctcctgtcagggacccacaagtgctgccttgaatgcgcatcagtggacgtgaagtgacaacctaattagttagtcacaaggtagtgttcaaatgt

SEQ ID NO: 1898 - DNA, 590 bp, Mus musculus
tgttacaggacagcaattctgtttgtaagagtgcaaaccaaaaccgccccgagactgctaccacagcttcacctgtgccaggcactgtcctggggtgtggtcttagctcatttactttccccagtggtctgggacaacacagtccactgcagtgatagaatgttgtagagccctgtataatatgcagccaagacccacacatgacgactcagcactttaacattttgtttttataagtgtgtgtgcgtgagtgtgtgagtacgtgagtgtatgcgtgtgtgtgcatgtgcgtgtgtgtgtgtgtgtgtgtgtgcacatgtggaggtcagaggacaacttccaagagtccattttctccttctatcatgtgagtctcaaggagtgagctcagggctttgggcttgcaggccagtgcccttgccctctgctccatctcactggcccacatttgaacactaccttgtgactaactaattaggttgtcacttcacgtccactgatgggcattcaaggcagcacttgtgggtccctgacaggagatgacactgggtggctgtcctcgttccacagatgagcacgcaagactgcag

SEQ ID NO: 1899 - DNA, 519 bp, Mus musculus
aaagctgtaaacactttgcatgattgggtccccataaaaacagtgttggagcttaaatgagcctggagcttttcaggaactatgggagcactctgtacacaaaggtgtactggccaagtgtctgcaccagcatcatcctctgctgcctcacatgtccagcactctggggatgtccagcacctcattgtgttccagacaggcaaccatgatctctgacagaatgacgaccccagttcttcccacgccagcactgcagtagcgcagcagcgggggattgtggcttttgggttcactggtactgtttgtatgacgtcgaactgactggatctcttcaaggtaggataaaaatcctttgaggtcttcgggacagccgtgttcaggccagtctgtgtactgaagatgccaaacggttctctcctgccctgtgagaaggtgcttcatcttcaaacctgtggtgccatagcagcccgagtccgtgcggaacgctatggtgatcttaaaccttccataggtgacagt

SEQ ID NO: 1900 - DNA, 586 bp, Mus musculus
tgtgcttcagcgactccgatcactgggcctctgcatatttttgagcccaagccccatgtcacagagcctgagaagagggcaaaggacatcagccctgtccacctggttgtggagacccatcggccccgaagagatggactgctgaccccctccatgtccgagtcagacctcacgacctcagggaggtaccgagctaggagggactctgtcaagaaaaggccagtgtcagacctcctctctgggaaaaaaagcgctgtggaaggacttccgccactaggggggatgaaaaaaactcgagcagatgcaaaaaaaattggtcccctcaagctggcagccctcaatgggctctccctgtcccggctgcccctgcctgatgaaggaaaagaagtgtccaccagagcgacaaatgacgagaggtgcaaggttctggagcagcggttagagcaaggcatggtcttcaccgaatatgagaggatccttaagaagcggctggttgatggtgagtgctcgactgcccggctccctgaaaatgcagagagaaatcgatttcaagatgtgctcccctacgatgatgcgagagtcgagt

SEQ ID NO: 1901 - DNA, 358 bp, Mus musculus
  misc_feature (1)..(400): N IS G, C, A OR T
aaagaaaatgcagtagagacactaagcaaacactggtctgtggtcgctctcctcatttcccaagatggtcaaatggcacgcttgtctgtgaggctgcacgggnangacctcttgccgcccagtgaggtctgaggaggagacattggcaggggcacctctgtggagtctcatgctcaccttcctctctcggtcggcccgtgagatcgctctgggagaggtattgccagtttgttggatgcgggaggctggagtggaagccacaggtcgggctgcacttcggagtcggttggcggtacccgtgtaggtgggccagggggcagggctctggtcgcggaccctcgcaactgccccatcctct

SEQ ID NO: 1902 - DNA, 581 bp, Mus musculus
agggctggggagcgagtcctctcctagagtgacaggtgtgcgcgtcttcgagtggaggctgacctccctgcatcaggttgaagcatggagttgcgtgtgggaaataagtatcgcctgggccgaaagatcggcagtggctcctttggagacatctacctgggtgccaacattgcctctggtgaggaagtagccatcaagctcgaatgtgtgaagacgaaacatccccagctccacatcgagagcaagttctacaagatgatgcagggcggagtggggatcccgtccatcaagtggtgcggggctgagggagactataacgtgatggtcatggagctgctggggcccagcctggaggacctcttcaacttctgttcccggaagttcagcctcaagacggtgctgttgctggccgaccagatgatcagccgcatcgagtacatacactccaagaacttcatccaccgggatgtgaagcccgacaacttcctcatgggcctggggaagaaaggcaacctggtgtacatcattgacttcggcctggccaagaagtaccgcgatgcccgcacacaccagcatattcc

SEQ ID NO: 1903 - DNA, 514 bp, Mus musculus
ccacaaggtatacgcttactataattttatacagaatttctaaataacttcacattctattaaaaagactataggactcagtataccatatatatttatgtatagatatatatcattctgaaaactgttttacaaaaaatttttcataacatcacttttgatagatataaaacagaagacagtaattttttagaatgtaaatatattttaaaaattaaaacacctaagaaatgcaatctatatacatgaaaaggtagaatatttatatgatgacagcacattacccacaagcagtgatggtgtttgttatatccagattgcggtttaacaccacagtgatagatgactgttctttagggaaattatgtaaggtgcatagcatgaggaacttaacagaacactgtaaatggacaattaatgccaagtaacagtattttctctaaaaacatgttagtaaacaaataccttaaactaatgaaccacaaaatgagcttattaagtttaagatatatag

SEQ ID NO: 1904 - DNA, 605 bp, Mus musculus
tgcctgctgcctctggacagctgagccgagttgctgatttgctttaacttgtaagatacccagcttgctttattttctcaggatcattgtgttgctaagcctggggacgctgttttcttttacaaagggaaatctaagttcatttcaaggcattcgaaatggggaaagactattatcacattttgggaattgacaaaggagctacagatgaagatgttaaaaaggcttaccgaaagcaagccctcaaatttcacccggacaagaacaaatctcctcaagcagaggaaaaatttaaagaggtcgcagaagcgtatgaagtactgagtgatcctaaaaagagagaaatatatgatcagtttggcgaagaaggcttgaagggaggcgctggaggtactgatggacaaggaggtaccttcaggtacactttccacggagatcctcatgccacatttgcagcctttttcggaggttccaacccttttgaaatcttctttgggagacggatgggtggaggtcgagattctgaagaaatggaaatagatggagatccctttagtgcctttggattcagcatgaatggatatccaagagacaggaattctgtg

SEQ ID NO: 1905 - DNA, 20 bp, Artificial Sequence
  There is no sequence for this end of this clone.  This is a place holder.
  misc_feature (1)..(20): n is unknown
nnnnnnnnnnnnnnnnnnnn

SEQ ID NO: 1906 - DNA, 20 bp, Artificial Sequence
  There is no sequence for this end of this clone.  This is a place holder
  misc_feature (1)..(20): n is unknown
nnnnnnnnnnnnnnnnnnnn

SEQ ID NO: 1907 - DNA, 539 bp, Mus musculus
aaattaaataaaattatagttacaatgacactccaaacagaaaagcaaagtaaaaaaaaatcaaaaccccagcttctatcttgtgtaattagacttatacagaaattagaaagctaaataacaactagttaatcacctaatttcacagctatctgaagtggcaatcgttatatagcagcttatctatgatacattcaagataaatgatacaatttattacttgcctgtaagctaaaacacagccttggtttaatacctttccttaaattccacctctacactacaatatacttgaggtctatgcaaaaagtagctaccttttatataagaaatggatgattaagtctttggtgctgtaaaagcaacttcatttaaacatcaccaccatcaccaccaaggggagagggggagggaaaaacccaatacacacttcctaagagaaaaagcatgtaatttctgtccctgacggaatgtattaaataagcaaacaccaccaacaagcaaaaacgagtactacaatgtaaaaatacttaaaaata

SEQ ID NO: 1908 - DNA, 592 bp, Mus musculus
  misc_feature (1)..(600): N IS G, C, A OR T
gatctcttggctgagaaagctgatagaagagaatttgttaatctgttgaagaaaatgttgctgattgatgcagatttaagaattactccaattgagactctgaaccacccattcgttaatatgaagcatctactagattttcctcacagcaaccatgtaaagtcctgttttcatatcatggatatttgtaagtctccgagttcatgtgaaacaaataaccacagtaaaatgtcactcttacgaccagtcgcatcgaatggcactgctgctttagcagcaaactttactaaagtcgggacactaagaagtcaggcgttaaccacatctgctcactctgttgtgcaccatggcatacctctgcaggcggggactgcacagttcggttgtggagatgcttttcatcagaccctgattatctgtcccccagctatccaaggtattcctgcagcacatggtaaacccaccagttattccataagggtagacaatacagttccgcttgtaactcaggccccagctgtgcagcctctgcagatccgacctggagtcctttcacagcagacatgngtctggtcgaacacagcagatgcta

SEQ ID NO: 1909 - DNA, 377 bp, Mus musculus
aaatttttaaaaaagcgcatacatttattaagaatttgaagttattaaaaatgtattaaggggagtattataaattcagaagtccttagaacttggcacagaagaatttaggtttcaagggattccttccagtttcctattgcattcctcattgctctgagctttaggatcccctgccctggaaccctggcagctcaagaacccagaacagatgggggaggctctgctgcacctgcagccaaattcagacagctggacatccagtcagtgtgtgtagcgttttctgaagttctctggagtgatggggaccatttcctcacttagcagcgaaaagctacatgggcccctttcaaatgctggccccatcacaaacccag

SEQ ID NO: 1910 - DNA, 650 bp, Mus musculus
gatggccgactcgcaggacccactgcatgaacgcactagacggctgctgtctgactacatattcttctgcgcacgggagccggacaccccagagccaccgcccacgtctgccgaggcggccttgcttcgctctgtgactaggcagatccagcaggagcaccaagaatttttttcctccttctgcgaaagccggggcaatcgcctggagctggtgaaacagatggcagataagttgctctccaaagaccaagacttcagctggagccaactggtgatgctcctggccttcgcggggacgcttatgaatcaaggcccttacatggctgtcaagcagaagagggatctggggaatcgtgtcatagtgacccgagactgctgtctcatagtgaactttctgtataatctgctcatggggcgtcggcaccgcgccaggctggaggctctcggcggctgggatggcttttgccgcttcttcaagaatcctttaccgctcggcttctggagaagattgctgattcaggcttttctgtcaggcttctttgcaacagccatcttttttatctggaaacgtttataagtttaaaatttttaaagcgatcttacctacctacctgtgaaccctctaaggacaattctgggtaattggataa

SEQ ID NO: 1911 - DNA, 428 bp, Mus musculus
aaaaaaattatatactttattacaaatggtaaactcagaatgcttcaaatctcttatttacaaacactgggcaggacacccaaacaaacaaacatggaataacttacaaaggctggaagctgtttattgacagtaatcagctttcatcaaattaaaaaaaaatatatatgtacatacacagttgagagaggcaggccaggggagttcatctgcagtctagcctggcacttacaagcctccccccccttcccagccctccctgctttgtgttaaggagcactacagaagcaatctacagtctctattgcagtttgtaacccctcccacccccctttaatactgaatgagatcgaatgttaggtccatgcagttcttggtcaatgttaacgaaaagtccatcgttctggtcgcgcgcgggcacagcccgt

SEQ ID NO: 1912 - DNA, 609 bp, Mus musculus
  misc_feature (1)..(609): N IS G, C, A OR T
tgaagccaagggtacacaagatggactgggttgcgacctgacggcgcccccagtgtgctggagtgggaaggacgtggcgcgcctggctttggcgtggagccagagagcagcggcctattggccggcagactttgcggacgggctgtgcccgcgcgcgaccagaacgatggacttttcgttaacattgaccaagaactgcatggacctaacattcgatctcattcagtattaaaggggggtgggaggggttacaaactgcaatagagactgtagattgcttctgtagtgctccttaacacaaagcagggagggctgggaaggggggggaggcttgtaagtgccaggctagactgcagatgaactcccctggcctgcctctctcaactgtgtatgtacatatatatttttttttaatttgatgaaagctgattactgtcaataaacagcttcctgcctttgtaagttattccatgtttgtttgtttgggtgtcctgcccagtgtttgtaaataagagatttgaagcattctgagtttaccatttgtaataaagtatataattnttttaaaaaaaaaaaaaaaaaaaaaaaagggcggccgcctgatgcnaa

SEQ ID NO: 1913 - DNA, 438 bp, Mus musculus
cgctttttcttcaaatgcctttacctttcatagctccaggtgagcacccgggcatccccctctccattgcctgaacggatggatcaccgagggaaacaggcaggattttggcaggttagcggtttccctttatagatagagtagaaggtgcttggagttagcctgaaagggtgaggagatggggtagacatgggtaaggagggccttgtgcttcaaataatctccgggtaaatgcgggtagaagtgatctactacaatttccaatctaagggcgggtctgggagggggcgatgagttcagaggaggcccaccgctcttcagaggagcgcacagaagaacttcttctcccggaaggggttctcggaagtgggcacaggagtgatgagggggtcctcacaagcgtgggcatcacagtatgtcatcaggtctgctgctgcc

SEQ ID NO: 1914 - DNA, 771 bp, Mus musculus
  misc_feature (1)..(778): N IS G,C, A OR T
gcagaacttaagctgtggagactgagaccacccctccaaggatctcgtctgagcatctctagtgaccttctctgcattaactgtcagtgctacggatatttttagctccaagtcctggcagggtggggcacctatctgaggcagggtttggtgccccctccccactgaccctacatccctggctgccgctgctgttacttcaggatgaaaggggagacccccgttaacagcactatgagtattggtcaagcacgcaagatggtggaacagcttaagattgaggccagcttgtgccggataaaggtgtccaaggcagcagcagacctgatgacatactgtgatgcccacgcttgtgaggaccccctcatcactcctgtgcccacttccgagaaccccttccgggagaagaagttcttctgtgcgctcctctgaagagcggtggacctcctctgaactcatcgccccctcccagacccgcccttagattggaaattgtagtagatcacttctacccgcatttacccggagattatttgaagcacaaggccctccttacccatgtctaccccatctcctcaccctttcaggctaactccaagcaccttctactctatctataaagggaccccgctaaactgccaaaatcctgcctgtttccctcggtgatccatccgttcaggcaatggagagggggatgcccgggtgctcacctggagctatgaaaggtaaaggcatttgaagaaaagcgaaaanaaaaaaaagggcggncgc

SEQ ID NO: 1915 - DNA, 523 bp, Mus musculus
  misc_feature (1)..(523): N IS G, A, C OR T
cctcccctccatcattgtttgaaataaatgaactgcttcactctggccaaagttaaatgttttcttgttggttgctttaatatcaggctctgctgcatcaggaagatttcctaaatctccctcccttttgtggctttgggctagtaaatctgcagctctgcctgtcccttccacacaacaactggaactggggggctttcctgagggtcctccagtcctgtagggatgacatttggcccgccttcattttcaangcccccacaggaactccttgcccaattctagcatgaattctttgctgattactggttttttcaagttctcttctcagtctgacttctgccccttnctttccancngtgccctcttcccccatgatgaantgggagtgttgattcttcagaacattcattttgctcaagggcttcactngggtttgtttnggagccaccacatctctcccaccaagatcatttctgttttctatccctccccatggggctattccaatagtgcaaatttt

SEQ ID NO: 1916 - DNA, 618 bp, Mus musculus
gcctctgcatcagctcctgctttctgacctgcttgagttccagtcctgacttcctttggtgatgaactgcagtatggaagttcccagaaatcctggatagagagcactttgaccaagagggagtgtgtatatattataccaagctccaaagaccctcacagatgtcttccaggatgtcagatttgtcagcaacttgtcagatgtttctgtggtcgtttggtcaagcaacatgcatgctttactgcaagtcttgccatgaaatactcagatgtgaaattgggtgaacactttaaccaggcaatagaagaatggtctgtggaaaagcacacggagcagagcccaacagatgcttatggagtcatcaattttcaagggggttctcattcctacagagctaagtatgtgagactatcatatgataccaaacctgaaatcattctgcaacttctgcttaaagaatggcaaatggagttacccaaacttgttatttctgtacatggaggcatgcagaagtttgaacttcatccaagaatcaagcagttgcttggaaagggtcttattaaagctgcagttacaaccggagcttggattttaactggaggagtcaatacaggtgtg

SEQ ID NO: 1917 - DNA, 843 bp, Mus musculus
  misc_feature (1)..(900): N IS G, C, A OR T
catgatggcagctctgaagagagagaaggaagaggaaaggaggcagcgggaggcggccccaccatgacccgactggcgcctggctgctggtatgtgggtagctggatgtcctccaaacgcacaccgggagtgactgaatgcttccatgtggcatggctttgagatgaccaagaacggggccagactcagctcggcttcttcccggagagactcgccattttgttaaaacccagaacttctccgaggcacctcatggtccaaatcttccactcagcagagactctcagttgaaggggcttttttcttttgtatttccggaatttatgctgagagccttccagaccgtggttttaggcatttcatctgatatattaatctcagaagggtcacatctgaagctgctgctcttgccaggactacttagcagcttcctgctttccaggggaaacttgtcacccccaatgtccaacatcttctcggcctcctcctcctccttcttcttcgcatcgtccagcttcttctttttgctctcaggcatgaggtcgtccagccagcttagctcacgcttggagaagcagagatccatgactttcctgacgaagaccaaggccagcaccatcattgggaaaacaatggcggccggcgatgccttgatgacccagagcaggacgaggcaggtgagctgcactagcgtgaacaggtgcaccttgcgcagggcacgtgccgcagtagatgaagtctggctggtgttttgcaggcatccgaaaagttcagacggtcgaagactggatccatgtagcgagagactccatgntagagaaactccgtgagcactggcatcgg

SEQ ID NO: 1918 - DNA, 605 bp, Mus musculus
aggaccacaacatcctggctgccgaagtgaactgggcaaacctgacagtcagcgaatgccaggagatgcacggggagttcatgggatctgcctgcggtcaccacggaccctacacgcccgacgtgctcttttggtcctgcattctgttcttcgccatcttcatcgtctccagcaccttaaagacatttaagacaagccgctacttcccgaccagggtccgctccatggtgagtgacttcgccgtgttcctcaccatcttcaccatggtggtccttgactttctgattggcgtcccgtcgccaaagcttcaggttcccaatgtgttcaagccaacaagggacgatcgaggatggtttattaatcccattggccccaatccctggtggactgtgatagccgcaattatcccagctctcctgtgcactatcctgatattcatggaccagcagatcaccgctgtcatcattaacaggaaggaacacaagctcaagaaaggctgtggctaccacctggacctgctcatggtggccgtcatgctgggagtttgctccatcatgggcctgccttggtttgtggccgcgaccgtcctgtccattacccatgtg

SEQ ID NO: 1919 - DNA, 808 bp, Mus musculus
cctttttgtttttttttctcctcttattttaatagagttagacttgcctagtgttctctcctctcccatagccaagtggtttctggggctggagttcacagctgagttttgtttgacaggagcacctttctgtttgtctgtggacactttccctcgagaaggatccctctcctctaggatgacccgttgtccatccagacttgagataggggcaccaagatccaggggctccttctccccgctcagtctcaccagcaggctacccaggtccaggccatatttggccaccacgggccgcaacacttccgtgactggcttggtgggcttggccttgagtcccactgaccggttaatcggaacgagatccagccgaaacaaagtccgcttttccaagcgtaggtccctggtggccaggatgctgctgtcctgatgcagcacaagaggcttgtctccgcccaccaggaagaggtccacagcagccccattgatgccatgccgttcacacaatccagacagaatctctttgatggagaacccggacttgacagcaaccacacaggatgtcccgtctgggaggtggacacagcaatgtttggcagccttatctttctcgagtgctgaggtcctacaggcctctgacaggcctaggctccccgcagaagatacagagccttgggactcccgacggcagaggcctccattggcatgaggggcatcatgggcatggtcaccatggtccttcttcttctggggacgcaccgtgctcctgctccttgaccaagagaaaaaggcccctctgcgttttttc

SEQ ID NO: 1920 - DNA, 568 bp, Mus musculus
aacatccctccatggcctctgcatcagctcctgctccctgccctgcttgagttccagtcctgacttccttgatgaacagcagtgtggaagttctgcaactgtgtctgatggtgagttgactggagctgaccttaaggactgcatcagcaacaacagcctgagcagcaatgccagcctccccagtgtgcagagctgccggcgcctacgagagaggagagttgcaagctgggcagtgtcatttgagcgtctccttcaggatcctgttggtgttcgctacttctctgattttctacgtaaggaattcagtgaagagaacattttattctggcaggcctgtgagtgcttcagtcatgttcctgcacatgacaaaaaagagggcccgggagattttcagtaaattcctgtgcagcaaagccaccactcctgtcaacattgacagccaggcccagctggcagatgacattctcaatgcaccccaccctgacatgttcaaggaacaacagctccagattttcaacctgatgaagtttgatagctacactcgctttctgaaatcccagctgtacca

SEQ ID NO: 1921 - DNA, 730 bp, Mus musculus
gttttaccattcagtgtttatttagacacacataaaagaacctgtggttcagacagcttgtgctcttcttttcttttggtcatatatatatacatacgtacatacatacacatatatatgtatatgtgtgtatatatatatacacacatatacatatgtttttttttaaaaaggtcaacacatcaccagtctcctacatgctttctatactgagcaatatatacagcctattatatatatgtgcatatatataatatatatttcaataactacattcaagtaatgaaacacaggatttacagtttccctctgatggcaaagggaaggcaaattcacaaacagttcacagaggaagtactgtgagcccagccagcaggagccggactctccaaggaggagggggtggcagcagaaatcagccagtcacccactgttctccacgggcaatgcggtgcaaaccagggcagacgggcctactctgccagggcgtttaaagcaggtctgggagcttaattaaatgtccaggaattgctcaaacttgggattcacaaaggagaagccatggaaggcttcctggtccatagagtcgatgaggttcttgtcactgaaggaaagctgaggtttctcattcaggaactctgggtcaaagttgctgtagtctgaaggggatttcactttgggcttaaagggcggctcaccttccgcttctccaggagggaccagttgatag

SEQ ID NO: 1922 - DNA, 590 bp, Mus musculus
gcaaagacaagtactttgcaatcaagtgtctgaagaaggacgtggtgttgattgacgatgatgtagagtgtaccatggtggagaagcgggtgctggcgctcgcctgggagagtcccttcctcacccacctcatctgtaccttccagaccaaggaccacctgttcttcgtgatggagtttctcaatgggggtgacctgatgttccacattcaggacaaaggccgcttcgaactctaccgggctacgttttatgcagctgagatcatctgcggactgcagtttctacacagcaaaggcattatttacagggacctcaagctggacaatgtgatgctagacagggacggccacatcaagatcgctgactttgggatgtgcaaagagaatatatttggggagggccgggccagcacattctgcggcactcctgactacatcgcccctgagatcctgcagggcctgaagtactccttctcggtggactggtggtctttcggggtcctcctgtacgaaatgctcatcggccagtcccccttccacggcgacgatgaggacgagctcttcgagtccatccgggtggacacaccacac

SEQ ID NO: 1923 - DNA, 711 bp, Mus musculus
aatagaaacaatagtatactaagtggtatctacgtgcttgtactatcactgaatagacattgagatttcagggcaagggagagtgtcagccaagtccacaagtttttatctgagatcaatatgccagcggacagtcctttgctatgcagctgatcattcggttgttccagaaggagtgcttaggcacaatctagtcttttggttgtcactattcatcaccaaatttaagatgttacacctttaaagagaaagttccacacactgagtgacagtgtgacataggcatatccacacactgagtgacagtgtgacatatgcatatgtgtaactcgagtatttgttgaggaactttagaggcagaatacaaacttttcacttaaaaaacgtttttaaatggcttgggagagaaggatttgataaatgggaatttaaatgttgttcatgcttcttattttaaaagtgcttcaaatccttcaataaggttctgaaaagttgtccggttagatggttggaattcccagcattttctcataagctgataaacctcatcaggacagttgggtggacatggcagacgctttccttctttcagagtattcacaagccgtgtcactgtcatctggccatgggttgggcctatcattttcaggaacaaggccatgggactaaaatctgagtcacagtaagtgagcagctcgtgcggatagtcga

SEQ ID NO: 1924 - DNA, 592 bp, Mus musculus
cacgagctgctcacttactgtgactcagattttagtcccatggccttgttcctgaaaatgataggcccaacccatggccagatgacagtgacacggcttgtgaatactctgaaagaaggaaagcgtctgccatgtccacccaactgtcctgatgaggtttatcagcttatgagaaaatgctgggaattccaaccatctaaccggacaacttttcagaaccttattgaaggatttgaagcacttttaaaataagaagcatgaacaacatttaaattcccatttatcaaatccttctctcccaagccatttaaaaacgttttttaagtgaaaagtttgtattctgcctctaaagttcctcaacaaatactcgagttacacatatgcatatgtcacactgtcactcagtgtgtggatatgcctatgtcacactgtcactcagtgtgtggaactttctctttaaaggtgtaacatcttaaatttggtgatgaatagtgacaaccaaaagactagattgtgcctaagcactccttctggaacaaccgaatgatcagctgcatagcaaaggactgtgccgctggcatattgatctcag

SEQ ID NO: 1925 - DNA, 828 bp, Mus musculus
attgcacatggtcctttttattttctgcagagaaaaggcttccttcctctgcagacctaaagcctcaggctggcagagtgacctcatctagatgtgatcatgacgttaaaaagcattcctgggtagtgattttagacagatggtgctgacatgaatgggctcagagcagtaatggaggggggcaatgaatcacaggacagctccaggcgtgttcccattaccgctggatcaggacggacagggctgctgagaggtcccatgactccaatgtcttcgtggcgggaggagagctcctggctgaattcccgccttcggacatgtctggttgatggcgagttgctttcccgagagggcttccctcccatcagttcttcacatctcccagacggagctgggcaaaggaggtagccagctgcagtgcttcctgaaggcagcccacgttcttgcctgtggcctgggcggacatgtccttgccaccgcctttaccatccatcaggcctgaaacctgctggacccactcgctggctttcagtccccggttggctgcattctggggaacctggcacaagcacgtgatcttgccagcctcattgtccaccgtgaacagcatggcagatgtctgaggagaatgcgtcttgaaaagcttcaacgcttcattcagggccttggcagatgctccactctccatctccaggatgaccagcggctggttggggttgctgtcaatcagctgctttgtcttctctaacactcgcttctgcacatcggctttgctggcccggtctaggtcatccatgactttcttcagggacttcagagtctctcgtt

SEQ ID NO: 1926 - DNA, 571 bp, Mus musculus
agtgaggacaaaaccgagtttacagtgaagaacgctcaggtccgaggcgggtacgtgctgcacataggaacgatatatggtaacctgaaagtgggggatcaagtccggctgtttattgatgagccccggcggagacccgtcatgagcaaccacacagctacacacatcctcaacttcgccttgcgctcggtgcttggggaagcggaccagaaaggttcactggttgctcctgaccgccttcggtttgacttcactgccaagggagccatgtccacccagcaaatcaagaaggctgaagagattgtcaatggcatgattgaggcagctaagcctgtctacacccaggattgtcccctggcagcagcaaaagccatccagggccttcgagctgtgtttgatgagacctatcctgaccccgctcgagtcgtctccattggggtccccgtgtcagagctgctggatgacccgtgtgggcctgctggctcccttacttctgttgagttctgtggaggaacacatctacggaattctagccacgcaggcgcttttgtgatagtgacagaagaagcta

SEQ ID NO: 1927 - DNA, 930 bp, Mus musculus
  misc_feature (1)..(1000): N IS G, C, A OR T
gtgtttaaatttaaatggtatgtgtacttgcttcacattgtctttctaggttggcgttcatgattcaagtatttcaagagtgatatgttctctttttggattcatattccaaacgaaaaaactgaagttttaagggaggcaactatgtgctcagacagtctgtcaatgacccaccttttttctctctccgttttcttttttccttttaaaaatgtatttattgcaagttgaaaaaaaaaacgaaaaggtcaagttagtgctgctgctgttccaaaaaaggtcacgaggtcagagttgaaagtttaagttcagattgaatccgaccctcctcccagaaggtcaccaggtagtaaaggagcagggctgcccatcctatggggatcttccaccgtcgggactccccacaagctagaagaatagtttgggggggccccacaaggaagtgccggcaagatcggccccactgctgccaccagcgctgctgctccactgcccgagaccggtggacccaccgaaaaggttcagcgcaggtccaacggggtctgcttggttctggctggtctccagggactgccaccctgtgcagtngcactcggggtggctgcagcgtagggggctgagcttgagccagaaagcggctgacttcatcctcagtggcaaactcggccaggatggtagtgtttcccaacacacacatgtgcagtgcagtctgggccttggctgcctcttgtttggtgctgtatcggatcagggcagtgcctggngttaggttcagatggaatgtcagcagtgggccatgctgcatgcagatcgttctcaggggtgaccatcaatctgtggggtaagatgtggagaccagcagtactaggacgacagagcacatcactcaggttagagcgangcatccgggatctgtgtcccacccctgac

SEQ ID NO: 1928 - DNA, 548 bp, Mus musculus
gctcaagcagttccccaacagtggcctgaatccaggtctctttaatgtggggccccagctatctcctcaacagattgccatgctgagccagcttccacagataccccagtttcagttggcatgtcagcttctcctgcagcagcagcagcaacagcagcagttgctacagaaccagagaaagatttctcaagcagtgcgccagcagcaagaacagcagctggcaagaatggtgagtgctctccagcagcagcaacagcagcagcagcagcagcagaggcagcctagcatgaagcattcaccttctcatcctgttgggcctaagccacatttggacaacatggtacccaatgcgctgaatgtggggctcccagaccttccaaccaaagggccaattcctggatatggttctggcttcagctctggtggcatggactatggtatggttggtggcaaggaggctgggaccgagtctcgcttcaaacagtggacctcaatgatggaagggctgccatctgtggccacacaagaagccaccatgcacaaaaacg

SEQ ID NO: 1929 - DNA, 781 bp, Mus musculus
ccgcatcatgtgtttgttttatttttaagaaatgattttaatgcaaatatactttgctgtcatatttgcacgatgttgaagacacttcttttctactctaagcactataagcctttgccatggtgatcttctggatcaggagaagggaaagcatgaatcctctggcctgccactgagactttttcccccatcgggactaggctaaaaatcgtgcccaaggtgaagctaagagtgaacactgattggaactcatgccttattttttcaagcttcccagtactcggggggctcagatatatatggtcccaccttcttctcaaaaagtgctttactattcagaagagctatggcatcattggctgcagtatcaagaaagagattctgcaaataataagccatgcgatagtaagtgactgcagcgactggcccaccagtaactggaagaaatgtgtttgatatatttaaatagcttgtcttctaaggactcatcattgtgttctgcaaacaaatggggaaatcgaaggtgtaccttgaagtcatccacagacatgttcaaatcctgggcaatgttttccagtgaagcatcatccagcccaaagtaagacctgtagagattgaatgtttcatccagattctctaagatatcactgatcatgccaccaagtggaatggtggctaatgctccagccttcatggcttctaggaagactttttgcttcagggaatctctcttgtagttaatggtggctcagtaagactttgaaagacagtgagatacgtg

SEQ ID NO: 1930 - DNA, 601 bp, Mus musculus
cagtaaggacaaagaaactcagggagatccaactgtccatcccacggtctcctcctttctatgtgcagttcttcctgggacaccagaactccacacctcatgtcctctcttcataaacatcctgaatctgaattcagttttagataaagacgttccctaagaggaaagccatcacagaagtgttattgccaccagatcaaggtcaccactgctgagcttctaccatacagagccatggcttgggcctccagctttgatgcattctttaagaattttaaaagggaaagcaaaatcatctctgaatatgacatcaccttgattatgacttacatagaggaaaataagctacagaaagctgtttctgtaattgaaaaggtactgagagacatcgagagtgctcctctgcacatagctgtgacaggggaaacaggcgcagggaagtccactttcatcaataccctgaggggggtggggcatgaagaaaaaggtgcagcccccactggcgcaatagagacaaccatgaagagaactccatacccacacccaaagcttcccaacgtgacaatatgggacctgcctggcattgggaccactaacttca

SEQ ID NO: 1931 - DNA, 662 bp, Mus musculus
  misc_feature (1)..(700): N IS G, C, A OR T
cacgaggaataaaaagaccttggtattccatccttttgagttacagtggggacaactgggaaagggaagagctgggagagggatcactggaagtctagtccacttagttcttgtattggaagggttcgtcgcctgtttcgttgaggagacacgtgcggacgatggcttctgtcaccgcataggggtcacaattggcagaaggccgacggtcttcaaagtagcccttcttctcctggccgacagtccggggaatgcggatactggcaccgcggttggcaacaccggcagaaaagtcgttgatgttggaggtttcgtggaatccagtcagacgccgggcgttgtccaggccccccttgggatcgtaggcgcgaatgtggtactggtgcctcttgctcagtttgtcaatggcctcctcaatgcacttcagaccattctcctcccgcatggccttggtgctgaagttggtatggcagcctgcaccattctagttccctggaatgggcttggggtcaaaggttgctatcaccccaaagtcttcgcacacccgatgcaagataaaacgggctatccaaagatgatctcccactcggatcccctcacagggtcctatctggaattcccactnggcaggcataacctccgcatttgtcccgtaatcttga

SEQ ID NO: 1932 - DNA, 575 bp, Mus musculus
tgggagtagagcagagtgtctgaacagcacgctcacccatctcctctccgcctcgctctcctgacctgttcacccatccatcatccggccggccaccgctctgaacaccttccaccatggccacctcagcaagttcccacttgaacaaaggcatcaagcaaatgtacatgtccctgccccagggtgagaaagtccaagccatgtatatctgggttgatggtaccggagaaggactgcgctgcaagacccgtaccctggactgtgagcccaagtgtgtggaagagttacctgagtggaactttgatggctctagtacctttcagtctgaaggctccaacagcgacatgtacctccatcctgttgccatgtttcgagaccccttccgcaaagaccccaacaagctggtgctatgtgaagttttcaagtataaccggaaacctgcagagaccaacttgaggcacatctgtaaacggataatggacatggtgagcaaccagcacccctggtttggaatggagcaggaatatactcttatgggaacagacggccacccatttggttggccttccaatggc

SEQ ID NO: 1933 - DNA, 824 bp, Mus musculus
aagggagagatttttgttttattaatgtataaaccatatcttttggggaagagaagtgggtactagggattcaagactaaacaagcacatatcatagagttggggcagctaaaacacaacagggataatcgctgtgcattccccagggctgtgtggtgcgaactgtctattcaccagagggtgtggccaaggaggacaagactgtgcacacacacagagacagcagcctcctctggggctgagatgggcaaggcctctcagatggtcacactgttttccaccaggctgggtcggaggtactcatagggcaggtccaggcttgcattccggacctcaatctccttgtccatgatagccagctcctcctggaattgcttcagcacatcccggggcctggggcctgagaaatactcctctttatgctgccccagggccaccatgacaggctggcgtctgccaaggaacttggtgactgttatctgcatccgtgcctgctgaaggaaggcaacgagtccacaatgtccctctctgtcacatccttggagatgggtgggggcttccgcatggtgcatgggccatttgggatccaggcataccagtccagctgacccagatgtgtagatgcgtgctgaccagtgcacgtgaagatgcacatagcgacaaagcggcacagctcagcccgggactctaaggacagggggaacctcggtcctgggctcaagcagtcaacctcagtacctcgcgcaccagactgcagctcgggtcctcttcaatcgggtcactctgtagaaagctcagcatgctttcacaaccgactgatgatc

SEQ ID NO: 1934 - DNA, 673 bp, Mus musculus
ggaaccagagattcatgaaggataaggatttagatttttccctctctctggtcaaagagttgaagaactttgctattaaggggactctagattttgtaagtcgtgtacaaaagctggaagattaccagaaagtattcccacatacaaagactgctctgcctgagcgggtccgtggttcctggaaggaagatgctctctttgggtaccagttcctcaacggtgcaaaccccatgctcctgaggcggtccatgcgccttccagcccggctggtcctgcctccagggatggaagacgtacagacccagctggagaaggagctcaaggctggatctctgttcgaagttgatttctccctgctggatggagtcaaacctaacatcatcatttttaagcagcaatatgtgacagcccctttggtcatgctgaaactacagcccgatgggaggctcttacccatggtcatccagctccagccaccacgacacggatgtcccccgcctctgctcttcttgccctcagatccccccatggcctggctcttggccaagatctgggtccgaagctctgacttccaactgcaccagttacagtcacatctgctgaggggacacctcatggccgaggttatttctgtggccacaatgaggagtttacccagcctgcaccccatata

SEQ ID NO: 1935 - DNA, 745 bp, Mus musculus
gtttaccctatccttttttaattttagtatactggtttttttaaaaaatataaaacaacatcatttatctatactatcccatcagaaattccaatttcacttaaagtttttttttccttaagcctactcacaatgaatatctatgtatgtgaaaaccccaagattacacgtgtaattactttctcccttggcataacataagtaaaatacataatatgggcagttaaatacttttttcccaaacattaggggtcatgatatatataaagattaatttcttatgcattatccctaatgtaaaaaacaaaatcacaggtatattatactgcttgtcaaaactccggtagtcacacctggacactacacgtccctgctgaggctttgtgtccaccatcagtatttctgcacgagcccttacaaccatctggagttggaaaccaattcccgttaaggcaaccctgtatgaaactgtcgtaaaatattctgttaagggaagctgtatgtgctagacctccaacacgccgccaggaacccccaaagcactactctgagaaggtaaacaacattttcacacattataaaaaatttcagctgctctgcaaccttcctttgctaaaagttagaaacattacaccactccagcaagagattaataaataaggattaaatattctatcttacaaaaacatacagaacggccaatgtcaaagtgaaaggcttgttcgataacgtcttatcaaattat

SEQ ID NO: 1936 - DNA, 621 bp, Mus musculus
ccaaaaaaccagggttagccgcccacatccaaactcacaggtttcctgaccgcattctgccaagaaaatttgccttaacaactaagattcccgatacaaaaggctgccacaaatgctgcatagttagaaacccttacacgggacataagtacctctgtggagctttgcagtctggcatcgttctgcttcagtggtatgagccgatgcagaaattcatgctgataaagcatttcgattttcctttaccaagtccactgaatgtttttgaaatgctggtgatcccagagcaggagtaccccatggtttgtgtggctatcagcaaaggctcggactccagccaagtagttcagtttgagacaatcaacttgaattctgcatcttcctggtttacagaaattggtgcaggcagccaacagctggattccattcatgtgacacagttggagagagatactgttttggtgtgtttagacaaatttgtaaaaattgtaaatctacaaggaaagctgaagtccagtaagaagctggcatctgagctcagttttgacttccgcattgagtctgtggtgtgccttaagacagcgtgttggctttctggaacacgggatgcagggtaaaagc

SEQ ID NO: 1937 - DNA, 697 bp, Mus musculus
ctggtatataaatttattcacatctctccagcaatagggtcacaaaacacttctgctgctccaagcccaggaagccaacgggccacccatctcagaagccctcccaagtgaccctgggtcttcagaatcaggagccaagatcagaaaagtgaaccactaggggagggctacagtggaccacagaggggagagtggaactgacaggcagggcagagccccagttttcacgatcagggccattcccagcaggcattacaatccaagttatggcaggggctggaatcccacaaagtcaagaagtctctcctcccttccttctttagaccaaccccaccactaggctcgagcatgggaaagacagcagtcatgtgattcttctcgtgaacaggaagctccctcttcatctgcatccctggctctgctacagcgcccaccacacctcaccaggctgtcggacatcccatgccctgggcctgaggcccatctgggattagaggacatggtgtgcagcatgcgtgcagagctggtgatggcccctgcactccagtgggaggggaaggagaggagccactcctgtctgcccttcaccgcctctgtctcagtttcctccctgacctgttgtggagcctcacaggcacaaaggcttgggcctgggagttcagaagctacccacatgacagggttctcccctaagctg

SEQ ID NO: 1938 - DNA, 638 bp, Mus musculus
  misc_feature (1)..(700): N IS G, C, A OR T
ccggacgggcctgaagtgtcagctccagattgaacgcctgtgtccaagtgaccccaatgccaaataccacggaatcttccaggcagccaagcagatcctgcaagaggaaggcccaagagcattctggaaaggacacgttccagcccagattctgtccataggctacggagctgtccaatttttggcctttgaagagttgactgagctgctctaccaagccaacttgtaccaaacgcaccagttctcagcgcactttgtgtgcggcggcctgtctgctggcactgccaccctcaccgtacaccctgtggacgtcctgcgtacccgccttgccgctcagggcgagcccaagatctataacaatctgcgagaggccatacggaccatgtataagaccgagggccccttcgtcttctacaaaggcttgactcccaccgtgatcgccatcttcccctacgcgggcctgcagttctcctgctaccgctccttaaaacgtgcctatgactggctcataccaccagacggaaagcaaacagggaaccttaaaaacctgctttgtggctgtggttcgggagttatcagcaagacctttacatatccnctggacctcatcaagaagcgcctgcaggtgggcgggttcg

SEQ ID NO: 1939 - DNA, 389 bp, Mus musculus
aacaaatgattgtgtttattgacaatttcatacatccgtacaaacgaaacgttaaaacagtcccaccccgtacagccggggaggagacaggcgccacagtataaaagttataaataaggggctttcaaaactgggataggacaaatctggacatgggcagcaattgccagtggcctcagacatgcagaagaggacaaagtgccacaggccacaagaccccacccatgcagggtagtggcgctttctctagaagggcaggctggcataaagacctctaaaacctggtggaggtcagggcagtgggccgacttctaacccccacactgccaaggggcccacctcaagtggcttcggttctttgggctaggagtttgactatgcgtgtggta

SEQ ID NO: 1940 - DNA, 581 bp, Mus musculus
aggcagtggagctctaccgagcggtgaccagctataagacaccttcggcagagcaaagtcacatcacccgtctcctgagagacaccttctcttcggtgcgacaggagctcgaggttctggctggggcggtgctgtccagcccaggtggcagccctggggctgtgggggctgagcagacgcaggccctgttggagcaatactccgagctactgctaagagctgtggagcggcgcatggagcgtagactctgagttcctgaagcctgtcccaagagaaatgctctccattccaaactgtatccctgcttccactcaagaaaaggtgggaatgtctggagtggacagcagtgatcagtgttgagaggcaaagcagccttcccagccgccctcatggagcccctgtatttattaatttatttccctgactttgcctcacttccttgggactcctgcctctaaagcccagcctggggctcgcagcagggcaagtcttgagtctacatcatcttggtgctgtgaggggtaaggagggcagcctgcctcccctggggacatcgggaagggctggccttctcttcttag

SEQ ID NO: 1941 - DNA, 583 bp, Mus musculus
ctcagaacatatgattactttaattctgaaatgcttctttcgagttttcccacaagggcaccagaaaattcacccaccttttcttcgtttttataaaactggaaagtcgggaggtgaaagatctcacagtcttgcaccagctgctcacaatcctcagtgtccacctccaagaataccacatcctcgtgcttcaaagacagggaatggaagagtggcttcatcattctgcaggggccacaccaagcggctgagaaatccacagccaccagcttctctccagcgtctttgagcacctcctcaaattcctccttgtctttgatcactctcaccaagccttcctccagggtctctatttctgctccaaggcctaagagtttgctctctgagagctgcacatcttcttctgaagacttgatagtgttaccttcctgggactggatggtgtcttcttcggacgcggtgatttcttcctgggactggatggtatcttctggggacttgggaatatctccctccttagatgggatgctatcttttaaaggcttatggattttatcctccttggactggatggattcatggg

SEQ ID NO: 1942 - DNA, 636 bp, Mus musculus
gcccaagtcctcagaagacagcgtccaacccaagaaagaggacaggcccaagtcctcagaagacagcgtccaatccaaggaaggtgaagtccacaagcccttaaaagacagcattcagtccaaggagactaaagtccctaagtccccacaggactcaatccagtccaaagaggataaaacccacaggcccttaaaggacagcgttcagtcaaaggagagtgaagaacctaagtcctcccatgaatccatccagtccaaggaggataaaatccataagcctttaaaagatagcatcccatctaaggagggagatattcccaagtccccagaagataccatccagtcccaggaagaaatcaccgcgtccgaagaagacaccatccagtcccaggaaggtaacactatcaagtcttcagaagaagatgtgcagctctcagagagcaaactcttaggccttggagcagaaatagagaccctggaggaaggcttggtgagagtgatcaaagacaaggaggaatttgaggaggtgctcaaagacgctggagagaagctggtggctgtggatttctcagccgcttggtgtggcccctgcagaatgatgaagccactcttccattccctgtctttgaagcacga

SEQ ID NO: 1943 - DNA, 708 bp, Mus musculus
aatttataaagtttatttattttttaaaaagtactctgagaaaacacacagtatagtcacttcagaaaagctatttggggaagactcatgtgcatcaagtggagtgggcttctaaaaaatatttgtaaattttccaaaaatttaaatgttaaaaatagtcctctccttatcaacttcatgtttaaggaaatatttgacagacaagtcaacaagagacaacaaaagtttacctggattttaaaacaatgaattctagattgataaaaagttcctggtttgtaccgaaaggccaaatgattggccttcattgatccatttctatatagttataaaaatacagtatcaaatctttttctattgcccctaaaattaggggaaacattttcagctgtgagtgtgtggatgcaggtgtgtagatccccaagtgtacaaccacacctcactttactaaggaaattattttcttcacactgtaaacatctctcttctacatctggacatttcagaatcgtctttggtattctagttgctgtgctttcagacagaaaccccagggtttctgcagcggttctacatagacatcttaagatataaataaggaaatgcacttggaataagttacaattagctgcttttgcataattttcaacaactacagtgtatgcctagtcacagttttatgaggaagagtatgtccttttcaactcc

SEQ ID NO: 1944 - DNA, 592 bp, Mus musculus
ccttgctctgttgttggacatgtttttcgcagcaaaagccctcataccttcccaaaaggcacgcaggtgattgctcgtaaccaagttcgccttgcagaggtctggatggacgaatacaaggaaatattttataggagaaacacagatgcagcaaaaatcgttaagcaaaaatcatttggtgatctttccaaaagatttgaaataaagaaacgccttcagtgtaaaaattttacctggtacctgaacactatttacccggaagcgtatgtgccagaccttaatcctgttatatctggatatattaagagtgtgggtcaacctttatgtctggatgttggtgagaataaccagggaggcaaaccattgattctgtacacgtgccacggcctcgggggaaatcagtacttcgagtattctgctcagcgtgaaatccggcacaacatccagaaggagctgtgtcttcatgctactcagggtgtcgtccagctgaaggcatgtgtctataaaggtcacaggaccatcgcccctggagaacagatatgggagattcggaaggaccaacttctatataatccattatttaaaatgtgcc

SEQ ID NO: 1945 - DNA, 841 bp, Mus musculus
aattttcaaatccagttttattaaagttgtttggcaattttggtggcagctcaaggtggtggcacacattacacacgagtctcagtttttgtttgcgggaggtctgggttcacgcacatctctaaccccctgctggtcactaccaagcaccaaactgctctatgcgtccctagtctccacagcataggaatttgtcaaatagggttgaaaaaaaaaattcttgtcaaatattaagaacatacaaagtatattaaggatttccacattgagacttccaggtatgaaaacagacacgtgatagtttgaggtttcttatttttacttattgattattagagttcagagaccagagtgtttcctaaggctgaaaaaaacccaccagaagcccaagtagagtttccatggacaacctctcccccacccccaatagagttagaggacaaaagaacctggtccttaaaaacttaaacttttcaggatagcatttgaaatgtaaatgaagtaaatacctaatttaaaaaaatcgagtgactttttctttagtaggattttccacctgcatagctcagggtattgtttgcttccttaggacacaccctttgcagtagaactgagcatagcctttgtttaactgtgtaactggacagcaaatggtgggtggctctctgtccaagggaaaacattcagaggatcagaaagcgaaacttccaagggcttggtgggcctagttgttctccagtgaccctgaagttgtaaatggagtcctgattccaaacttgctgtggaatgtcatggtgactttgtttttatgccctgttctctggtcaaagcgtggcatgta

SEQ ID NO: 1946 - DNA, 583 bp, Mus musculus
cgagctgctgaagccccggaccctggcggacctcatccgcatcttacatgagctcttcgcgggggacgaagtcaacgtggaggaggtgcaggctgtactggaagcctacgagagcaatcccgccgagtgggctttgtatgccaaattcgatcaatacaggtatactcgaaatcttgtggatcaaggaaatgggaagtttaatctgatgattctgtgctggggtgaagggcacggcagcagtattcatgatcacacggactcccactgctttctgaagctgctgcaaggaaatctaaaggagacattgtttgactggcctgacaaaaaatccaacgagatgatcaagaagtctgaaagaaccctgagggaaaaccagtgtgcctacattaatgattccattggcttacaccgagtagagaacgtcagccacacagagcctgccgtgagcctccacttgtacagtccacccttcgatacatgccacgcctttgaccagagaacagggcataaaaacaaagtcaccatgacattccacagcaagtttggaatcaggactccatttacaacttcagggtcactggag

SEQ ID NO: 1947 - DNA, 792 bp, Mus musculus
atggcttaggattttttgattgtttatgtttttagacaaggtctcactatgtgaccaggttatttgaagtttgtctcccttgttgtttcagggaagacaaactgtctgtccctctgttggttcaggttgaaactggcaatccctattagccagagaaaagcatgcagatataagttttctatagtacaagaaatcataaatgaagtaagatcccgataaacctgagtgttcctctgctgggtgtgacggagaatggagagctgtggagaaatggtctgatataaagattttaaattgggagccttagcaagacctcaagtgtaagacaaagacagggatgatcctggggtagggagaacacatctcatccgcttgcttttacaagcgcccacaggagcatcctaggatttgactgagggaaaggccagaaactccccgtaggtgttaggacctgcttccagagagaaggaaaatgccaaatgtccttcctgcttttgtttgtaggagagtgtcttcaagcgtggttattttgctggttctcattcttatattagagtaaacttccgagaagtacactttgtatttcatcgtttttcttccgtaatacaccttttgacacacttgcatcactttttgcaatgatttctttgctttgtgcaatactttgcctctgacaattttaaggttgactgtcaagaatattccgggaataagcagggtatggtagcacactcctttaatccagcactatggaggcaagacagaagatctaaggttagggcagctactcta

SEQ ID NO: 1948 - DNA, 576 bp, Mus musculus
gcatgttttaaatccagtaggttctccttttacgagactgttctctatattaaatttccaagcacaaccaatgacttttccaatgtcttttcaatgtctagcttgtgccctctcataaaaatctgctcattggtccatactggagtttcctaattttcttagtcattagcacagagtgtctagccacatagggagatctcctcgtcctgtatttccctatatggaaacgttttacttcactattggaagcgcattgccagctgttagcaatgtcttctgtgcgagcacaatgcaaatctaaacagcccaatgggaggcactgtcatgaaattacaatgctcccagactggagtggagaagcagcgcactcccttcaaacaatttaccaagtgggcactggaaggagacacaggaacagaagtcatccaaagaacacggtacttttttgtaaatatactttctgattggtccctgggcacaaggaagatggcggaatcatgtcttcccaggagaatgtcgcagatgtccaaggtccttacactgagctggagaatggaacgacctgctttccaccca

SEQ ID NO: 1949 - DNA, 544 bp, Mus musculus
gaaaccaagtctcactatgcagtcctagctaacctgtaactggctgtgtagaacaggctggacttaaattcacagagatctcccccatctcctcagagatgggattagatatgtgattaccatacctggttccaatctcagtttgctaatttgaaactaaacattggcattgtatggggacaaagttgaaacatgaacacaagctgtgatacgttgcaggaggtggctcatttcttcagcctttccttcccttgggctatgcactgtggcattggttaagtccctgacactcatacctacctagatatctctgcccatgatgcccccttccttgccttctccccaccctgaaacttgggactttccacttgggctttccttcctttgaggaaaccagggcgtttcatgttcattgtattttattgaacttttacgccttcttttgcagagatttcatgactgtaattatttagttgtgggcccgcagcctgacacggtccctcagtctcctgtggttgcctccccagtatggcagcagcaagac

SEQ ID NO: 1950 - DNA, 630 bp, Mus musculus
agcagtaggccagtatctgtcaacagcccctcctcgaactatgggtggtaatcgcttcacccgccctgtactgtcttgactcaattctttcatttttttcttctatcttgttcaaaaggttgtcagtttcttgtttgccttgcacatcactgtcgtaactctgaaggtccagcaacaccaatccatgtggataaattcgcacattggcaaagctgccattcttgttcgtgtaagttgctaaatatccatggtcctgccaggtgtgcactgactctgtcatcccctgctcctgaaaaaactggactgaaggcctttcagaatggcctcaccatcagctttggcacccagcgtgaagtctagcatgctgtgtcttgctgctgccatactggggaggcaaccacaggagactgagggaccgtgtcaggctgcgggcccacaactaaataattacagtcatgaaatctctgcaaaagaaggcgtaaaagttcaataaaatacaatgaacatgaaacgccctggtttcctcaaaggaaggaaagcccaagtggaaagtcccaagtttcagggtggggagaaagcaaggaagggggcatcatgggcagagatatctaggtaggtatgagtgtcagg

SEQ ID NO: 1951 - DNA, 374 bp, Mus musculus
gggaagagctttttagtagctaaatatggcaccatgggattccagagcaatataaattacagtatgcaaaacactgactggctgaggaaaagcacacgttcctgcctcatgtccaccgggagggaaaatgctcatatactttaaaaaacatccccatcatatatatatgtaaaaaaatgtcccctaaaaaggccaccaaagaggggctgggaggcccaccctttgccatgtacagagtacccactggagctgagtaggggccacccctactggttgcccaaagctctgtccaggttgctcttaatggggtccaggaagtctggggggttcaggaagggctcgttcagcttcacattgctgaggccatggataca

SEQ ID NO: 1952 - DNA, 560 bp, Mus musculus
  misc_feature (1)..(679): N IS G, C, A OR T
aaaaactatgatggagacgtgcagtctgacatcctggctcaaggctttggctccctcggcctgatgacatctgtgctggtctgccctgatgggaagacaattgaggctgaggctgctcatgggacagtcacccgccattaccgagaacaccagaagggccggcccaccagtaccaaccctattgccagcatctttgcctggacacggggtctggagcatcgtgggaagctggatgggaaccaggaccttatcaggtttgcacagacgctggagaaggtgtgcgtgcagactgtggagagcggagcgatgaccaaggacctggctggctgtatccatggcctcagcaatgtgaagctgaacgagcacttcctgaacaccacagacttcctggacaccattaagagcaacctggacagagctctgggcaagcagtaggggtggacactactcagctccagtgggtactctgtacatggcagagggtgggcctcacagcccctctctggtggcctttctaggggacattnttttacatatatatatgatggggatgtttttta

SEQ ID NO: 1953 - DNA, 455 bp, Mus musculus
gttctcgtcagacatgcagcggagaatgagatcaacatccagctgcccggagatttcattgatggccaggtactggcggtccagacacatccttgcaaagaggttcagctgatatctgtagtagctgaggatggccctgtcttccttctgtccctctttagcatcttgcgccaattcccggacactcttactacggatctctttgttgctgtccctccagaacagccacacctcttcctcatcctccccggcttccagagcattctctccagtggaaacgccttcaaactcaaaacgagaaagaaccagcttggtctcaatcaggatgtcagcattggtgggattgagcacagctttacagatgagctcctgtgtcacagggattgacttgttcatggatacgcagaggtcagagaggtaatccaagaacctgggctccctgttctttcgcacca

SEQ ID NO: 1954 - DNA, 674 bp, Mus musculus
  misc_feature (1)..(700): N IS G, C, A OR T
gtgataacaaagacgatattctcaaaggaggtgatgtggtgaggctcttccatgccgagcaagagaagtttctcacctgcgatgagcaccggaagaagcagcatgtgttcctgaggaccaccggcaggcagtcagccacatcggccaccagttccaaagccctgtgggaagtggaggtagtccagcacgacccatgtcggggtggagctgggtactggaatagcctcttccggttcaagcacctggctacagggcattacttggctgcagaggtggaccctgatcaggatgcatctcggagtaggttgagaaacgcgcaagaaaaaatggtatactctctggtctccgtgcctgaaggcaacgacatctcctccatctttgagctagaccccacgactctgcgtggaggtgacagccttgtcccaaggaactcctatgtccgtctcagacacctgtgcaccaacacctgggtacacagcacaaacatccccatcgacaaggaagaggagaagcctgtgatgctgaaaattggtacctctcccctgaaggaggacaaggaagcatttgccatagttcctgtttcccctgctgaggttcgggacctggactttgccaatgatgccagcaaggtgctgggctccatcgctgngaagttggaanagggcacaatcacc

SEQ ID NO: 1955 - DNA, 407 bp, Mus musculus
aaataggacaatttattaaaactatgcggtcagataaggccacaagccttggtgccagggagacctgcagggagggaaccctccaccaagtgaacgctggaagaggatgctcagaaggtcgcgtgtccaggacctttattgtcaggtttaaaagtcaggtcactggctgggggtcttaggttctcacacccaggccctaagcttcgtgttaaccctagatcttaaaggccaaggagaggccatcatccaggggcaggaggctgatgtagaccctggcgtccctcaggatgcgttcgttcaggttccgcacacattcaacagtcttgttcctgggctgaggctgcagcacttctccgcgccacaggactctgagtacagcgagcacgcctccgggacgtaggagctgc

SEQ ID NO: 1956 - DNA, 770 bp, Mus musculus
  misc_feature (1)..(770): n is g, c, a or t
acaggcccagcttctggccaacctggcgcggctcattaaggccaagaaagctctggatctgggtactttcacgggctactcggccctggccctagccttggcgcttccggaggctggccgcgtggtgacctgcgaggttgacgcagagcccccgaagctgggacggcccatgtggaagcaggcagaagtggagcagaagatcgaccttcggctgcagcccgccctgcagacattggatgagctcctagcggcgggcgaggccggaaccttcgacatagccgtggtggacgcggacaaagagaactgtaccgcctactacgagcgctgtctgcagctcctacgtcccggaggcgtgctcgctgtactcagagtcctgtggcgcggagaagtgctgcagcctcagcccaggaacaagactgttgaatgtgtgcggaacctgaacgaacgcatcctgagggacgccagggtctacatcagcctcctgcccctggatgatggcctctccttggcctttaagatctagggttaacacgaagcttagggcctgggtgtgagaacctaagacccccagccagtgacctgacttttaaacctgacaataaaggtactggacacgcgaccttctgagcatcctcttccagcgttcacttggtggagggttccctccctgcaggtctccctggcaccaaggcttgtggccttatctgaccgcatagttntaataanattgtnnctattaaaaaaaaaaaaaaaaaaaaaagggcgggcgc

SEQ ID NO: 1957 - DNA, 666 bp, Mus musculus
ccataagtataaatattttatttcaatcaaaggcagtagaaatagatttgataattataaagtagagacaatgacagatcccatcctattttccagaacttgaaaatcttgagcatcattctgcagtgatgattttatgtaaacactaattcctgaccactcactttttatgaatgctgtataactcagtcaccatatactaaattctcaaggactccccaagtccccatgatgaaagcactgactacagagcaattaaaaccctacggttaaacctcagcatttccatctgattgctacattcaccaacctgctaagaactaagaacagcaacagtaaatatacttcggtcctctctacaatggacaatgcacctaacactgacaaccttcattcttaagcctgagcatctccatgctaagctaaacagcggtttttaaagcttaacagctacacgacaataaacattaaagacacaatgaaaaattcaaattagttgcagtgacctaattcatttggtaattagttgtttaagatgtatggtggggtcaacataaatgggctaaacgtacgtgctctgtaaaaacaggaaacataggtatttcaagatcctaaactaggctgctcttgcactcagtggacctgtggtctcattgtcctcctcgt

SEQ ID NO: 1958 - DNA, 387 bp, Mus musculus
agcctgcagctttactttttcgaagatcccttcaccatacaccttatccaaacggataaatggaaagtggagtggtcaaagtgctggaggatgtggaaattttcaggagactcacaaaaataaccccatctaccagtccttatagataagactggaccgttattgattgagctgagaggaccaaggcaatacagtgttggatttgaggttgtagcagtttccataatgggagatcctggtcctcatggctttcagaggaaatctagtggtgactataggtgtggattttgctacttagaactggaaaacatacctgctgggatctttaatatcatgcctagtacttttttgcctaaacaagaaggaccttttttcttggactttaat

SEQ ID NO: 1959 - DNA, 761 bp, Mus musculus
ccagaaacaaatgtctcacttcacttatttgttttaagacatccattattacagaataaaatataaaagcaatcaaaaattatataattctaaaaataattctcccataggggcttgctttccaccctcttcttcagtgaaatcactgtgaagacggcaagaggtttcagctttgaatttctcagacgattccttccctggctagagaagccgcggggaatttgctcttgaaagctaatggacaacaaaacaaaccaaaacaaacaaacaaaaaaactcctaagaagcaaagttccttcttccagagagctttacccacccaaactggcttcttagtaagcaggtatcttcaaaaagcaagccctggggtgggcgggcagtattcctgggggccaggggcgcgggtgctgcctctggctccgccctttcagtctctggttggttcatattccagtggactgtgctcactcattgggaagcgagctgttcagtagtgactaagacacactttgtccatggccatctctatcctgtcaatcggatatggtgcctcacagagattggccagcacatacaagtaccgcaagacatgctcgtacgtgacagagtgccagttaaagcagtgtgtgcggaagtgggttacagcctcctggtagcagtcatgtgctgtgagcatggtcctctctgacagatgtctctcagcagtttccccaaatcgcgccagcagggaaacgatcttgtgcacagacttctcaatgacg

SEQ ID NO: 1960 - DNA, 725 bp, Mus musculus
  misc_feature (1)..(725): n is g, c, a or t
accaaagagacccttcacaagcagtaccacctggtcaagtcccacaccaacaccagccatgtcatgcaatatgggaacaaatctatctctaccatgaaagtgatgcagtttcagggaatgaagcacagagccagtttttttatctccctgcctccggtcacacaccttgacctcacccccagccctgacgtgcccctgaccatcttgaagaggaagctgctgagaaccaacgacgtgaaggaatcccagaatctcattgggcagatccagcaatttctggatgccaggcacgtcattgagaagtctgtgcacaagatcgtttccctgctggcgggatttggggaaactgctgagagacatctgtcagagaggaccatgctcacagcacatgactgctaccaggaggctgtaacccacttccgcacacactgctttaactggcactctgtcacgtacgagcatgccttgcggtacttgtatgtgctggccaatctctgtgaggcaccatatccgattgacaggatagagatggccatggacaaagtgtgtcttagtcactactgaacagctcgcttcccaatgagtgagcacagtccactggaatatgaaccaaccagagactgnaagggcggagccagaggcagcacccgcgcccctggcccccaggaatactgctcgaacacacctgggctcgcttagtgaatacatctgactagtaacaagag

SEQ ID NO: 1961 - DNA, 667 bp, Mus musculus
  misc_feature (1)..(667): n is g, c, a or t
acagtaagcttttattactcattaaaaaacatagaaagacatttagaaagaaaatatcctgaaaagaacacatacagagcaataatacaaccatagaaggcactaccagcagttagactcctctgagacgtcaggaactccatgctttccagaggctcaaccctcagtacaggtcctgggtctaactgtgctttaaagtctgaatcttaccatcattttctgaataaacgcctttctgtatatatagctatatgcctctatgtgtatatacatatatatataatacatgaattttttttcttgtcaaaaataaaaagccatccatggggggacgttctcagcagcattcacagtgtttgcagcaggagccatgccttctcctaacgctacagacatgcaggatgaagggaatgactttccacgtgcccctgtagtacacagcaggacgggggcttcttaagggagagaggtgtaaggctgggcatgagacctcaggcagccaaggggctgatggcgtgcacaacctcagagtcgctagctcatgttgctttttgcagctctgcaaacgatgcacagtttgaatgacaaggatttggcgttcttctgggacgggagcagtgtggcttcagctngggctggtagggaactttttaggctacacggagaa

SEQ ID NO: 1962 - DNA, 220 bp, Mus musculus
tgaatctccttggccttcagttccacctccacctctggctttagggtctccagctgttgcctgagtagtagctttgattacagtggtaaagtcctccaacttggagtcctttctggtgggaagcatggtctgctcgcagcacagcactgagcagacccgtgggcctgacttccccggtgacttcagtgcctttttgtttgcagagaaaagagtggggcac

SEQ ID NO: 1963 - DNA, 561 bp, Mus musculus
ccaacaatttgaacacatttaatttacatcacatatgtacaaaatatgtttgaacggaaataaaagcattctcttgaattaaattatagatttcagtataaaaatcttctctgtgtagggagttttcttcacttccagtcccaagcaatgggttcttatctctacagtgcttgccatggggggacgctcccaccagggggacagtgggagagtgtgacggatggagcccgcgctgtaaacattaaggattgctggctctttttacagaccgggacactgagatacaccccaatctctaacttccacggtgagggcactccaagccaagttcatgatccagcactgtggtctaccccaccatgagaatgacttcttttaatagtcttcaattggagctaattctggcatgaggtttacagatatatttgtatacagcctatcaaccagtattttgggtgtgtataataaattgttcagtccatcgatgtactgccgctccttggaataccgaagtaatttataccgtcctaggaactgtacctcccctcgatggatagtcga

SEQ ID NO: 1964 - DNA, 592 bp, Mus musculus
tcgaggggaggtacagttcctaggacggtataaattacttcggtattccaaggagcggcagtacatcgatggactgaacaatttattatacacacccaaaatactggttgataggctgtatacaaatatatctgtaaacctcatgccagaattagctccaattgaagactattaaaagaagtcattctcatggtggggtagaccacagtgctggatcatgaacttggcttggagtgccctcaccgtggaagttagagattggggtgtatctcagtgtcccggtctgtaaaaagagccagcaatccttaatgtttacagcgcgggctccatccgtcacactctcccactctccccctgctgggagcgtccccccatggcaagcactgtagagataagaacccattgcttgggactggaagtgaagaaaactccctacacagagaagatttttatactgaaatctataatttaattcaagagaatgcttttatttccgttcaaacatattttgtacatatgtgatgtaaattaaatgtgttcaaattgttggaaaaaaaaaaaaaaaaaaaaaagggcggccgcgacgcgccct

SEQ ID NO: 1965 - DNA, 498 bp, Mus musculus
ccatttaaaattttattacatgaaaagaaaatactccataaaacaaaccaataaaatttaaaacctaaatgaactcagtgacagattattaaggttctagctctgcccccaaaccgccatacattaaaaaatccaaaagaaatagaaataccagcttcaaaaatagttatccaaaaagtaaggcatccacttaaaaaaaaaagagagagagagagagacaataattcaaggaggggcaggtacaggctgaaggaatgagaggaatgaggggtagcgggtggtccctggccccccagaggccccacagcctgcctggactgtattcctaagggcatataattcagcccaaactcagcctctcaccagttaggggtagggtgagctaggtaggaagttgggagacctgctggcaggggccagggaaaggtccctgcatattccagtttgagtagatggaccggggttagggttctgccttgtgatcaaagggatagtcga

SEQ ID NO: 1966 - DNA, 523 bp, Mus musculus
  misc_feature (1)..(523): n is g, c, a or t
tttgatcacaaggcagaaccctaaccccggtccatctactcaaactggaatatgcagggacctttccctggcccctgccagcaggtctcccaacttcctacctagctcaccctacccctaactggtgagaggcttgtttgggctgaattatatgcccttaggaatacagtccaggcaggctgtggggcctctggggggccagggaccacccgctacccctcattcctctcattccttcagcctgtacctgcccctccttgaattattgtctctctctctctctcttttttttttaagtggatgccttactttttggataactatttttgaagctggtatttctatttcttttggattttttaatgtatggcggtttgggggcagagctagaaccttaataatctgtcactgagttcatttaggttttaaattttattggtttgttttatggagtattttcttttcatgtaataaaattttaaatgggnnaaaaaaaaaaaaaaaaaaaaaaaagggcggccgc

SEQ ID NO: 1967 - DNA, 546 bp, Mus musculus
atggttggtttggttttttggagcagtaagattcaagccatggatatgctagacctttgctctaacattgagttgtaccccagctcctgtgaattctttgtgaatgtaatcaacatagctcaggtatagagctctctacttatgatatcataccaacattaagaatttttatgttttttaaaatgatttattttacttatgtactacactgtaagctagctgtcttcagacacaccagaagagggcatcagatcccattacagatatggttgctgagaattgaactcagaacctctgagctctcagtgctcctaactgctgagccatctctccagcccccgaatttttatgttttaaagtatttcagattttgaagtttttggattgggaatgttcaacctgtttaagcctagcatagctttacacaccttaaattccaggacttgttagacagaggaagatctctgtgagtaccaggatagcctgggttacttagcaagttgcacaacagccaaggctactagatcctgcctgtctcaaaaatca

SEQ ID NO: 1968 - DNA, 600 bp, Mus musculus
ttcaggcctcttgcaaattcttacaatgatctcctagtttattaaacatacactagatctcggttgtttccatcggagcttgtgtgttgatcatcttcatcagactgttgttctgagccctgtgaatgaatgtattcatactcaataggctttggataattatatgggtagccattgtcatcaaaaaacctccgaaaggtgaactcatagaaagcgtgctcggggtgcttcccatttttataccatccgttcagagtgtcactgatattttcctcctcgctgccatcgctccacaatttatcaggatcaacagggtcgaaattggatgtatctgttggatgcgtgattttagggatgtatgaagcagactgctgtctcagatcactagagaaatcgatggtcttaaaaaatggatgagcctttatctcatcagcaccgttcttgccgaggcggtcttctggtcctcgacaaagtttgataatgaggtcagaggcttcaggactcagcttagcttgaggagggatgtgaagagaagtttgccagttgataacctttagagaagagttttaaaaattaggaagagataaaacacagtaattt

SEQ ID NO: 1969 - DNA, 596 bp, Mus musculus
ataaaaccttagaaaatattcagagcagttgaaaaagtcacaataaaaaagggcaacgtgatctggatacattcttctgcaagatgactcagacactgcgtctggaacagctttggataaatcaccaacacgagtaaaaacggtcttctggtgccggggctgtcagttcaaggtttcttgcgcttgggttgtgcgtggtgctgatatcccggtcccagctgagatcctgctctcatttcaacggcaacagagcaccttgtttctacatcggtccattcagactctgtaccatctggttgggcaggtgctagggtggacgatcttcgtttccgactaccagttggcaattcttgttttaaagtctcaatatcagtaaactgaaccgattgtccgccacctctcgtcttataaacatcacccttaatgactttagtctgaatctccccatcggaggctagttcctggtgggtcagcatgtacttctcacacttagctagcgccttttcatttgcaacagacactgtgatggcgtgagggacatgcggctgcatcactgtctcagtttgcacattagaggcaggcttatgatctaccca

SEQ ID NO: 1970 - DNA, 338 bp, Mus musculus
tctcgggacagaaattggaaatagagcgactggagaagaaaaacaaaactttggagtacaagattgagattctggagaaaacaactacgatctatgaggaagataagcgcaatctgcagcaggagcttgagagctgaatcagaagcttcagcggcagttttctgacaagcgcagattagaagccaggttgcaaggcatggtaacagaaacgtcgatgaagtggcagaaggaatgtgagcgtcgggtggcagccacccagctagagatgcagaataaactctgggtcaaagatgaaaagctcaaacagctgaaggccattgtgactgaacccaaacctg

SEQ ID NO: 1971 - DNA, 626 bp, Mus musculus
gtttaatttaaatccactttttatttttcatagattttaataattatacattactcttaacataaagatagtgaaatcttaaggataaggaggcaatttatatagcctcttctattcattgttcaggatggaagtttccaaagggaataggtatgagatttaacactggaaaaatacatatgaaacttgtttaaccggctgcacttaggaccaggcacagcacaataaatagagaactgcataatcttttaaaaagactgctatattttaacacatccttactaaagacgcactatcagtgaacaatctcaagttctacagtgtgggcaaagggaaagttacagtgaaaatctgggcattgtttctgtagcctcttcacactcatacatcaacagtcttagagcaaggaagaaaacacatctcgaatccaggacaacaaaaacaaacttggtcaagtagtttcttgggatcattcattctgatcacaagcctaggttgctggtaggtataagcagacaggttttgaaatctttctcatctccgctagtcagggctcctggatacgaagccacattggaagcaaaccgattaagcagcaccactaatccacctcccaacaagccatt

SEQ ID NO: 1972 - DNA, 452 bp, Mus musculus
gagctagctcccttacctttatctgaagtggtgaatgtagtgcatatgatatacattgtaagatacacattgtaacatgatccatactgtaaacttgtatgtaaggtgactaccccttccctcatctccagtaattgtaaacaggactactgcatgtactctgttgggaatggaaggccagaactccataccgtggatggatgggtacttaggaaacaactcagcatttgtagtcagaccacttgtaacttagtggtttgttgagtaaccattttgcaggaaatacttgcatttaaaaacataaaagattaatgttgcaattatttgtatcaatcaggaccatttttgtggggcacttgggaactatttggttttgaaacagacattggtaagactgaacataatagataaatgagttacctgtgaaaatgtgaaagaaaggaaaaaaaaag

SEQ ID NO: 1973 - DNA, 539 bp, Mus musculus
ggaaaattagagtttttattctatgcaagaaaaacctatgcatggacttggtacataatttcttaatttgagaaagatgtgtaaatctctctgttactactataaaatgctatcaggacatcagcaatcgcttattatatacaaacatcaacttacacatgatttatgtctaggaatcatttcatctaggaaagcctggcagcttctttgaaaatgcagttatccacagctctgccacagctgggagagcaggtccggcctgggacccaagggccacacccatatgtaacggtcatcagtgtaaaaacatcacaaaaccaccacacaactgtcaccagtgtgaaagtcacttcacagtctatctagcccatcaaatgcagaatgattcaccactgcatgcagatgcatggacagtctccgttccagttcttaagcaaaaggcagaactcagcatcatcttctgtcaaggctcaaagtattaacagaaagtccatggctacagaaaaatgatctgaatgtcaaaggttaaccacctttat

SEQ ID NO: 1974 - DNA, 705 bp, Mus musculus
caccgtattgcgtgagacgaaccggacggcgccgggccatcattcgtcggcccgagcgatggcgctgttccggggaatgtggagcgtgctaaaagcactggggcgcacgggggtcgagatgtgcgcgggctgctggggtcgcatcccctcgtctatcagtcttgtctgtattccgaagtgtttttccagcatgggtagctatccaaagaaacctatgagttcataccttcgattttccacagaacagctacccaaatttaaagctaaacacccagatgcaaaactttcagaattggttaggaaaattgcagccctgtggagggagctaccagaagcagaaaaaaaggtttatgaagctgattttaaagctgagtggaaagcatacaaagaagctgtgagcaagtataaagagcagctaactccaagtcagctgatgggtatggagaaggaggcccggcagagacggttaaaaaagaaagcactggtaaagagaagagaattaattttgcttggaaaaccaaaaagacctcgttcagcatataacatttatgtatctgaaagcttccaggaggcaaaggatgattcggctcagggaaaattgaagcttgtaaatgaggcttggaaaaatctgtctcctgaggaaaagcaggcatatattcagcttgctaaagatgataggattcgttacgacaatgaaatgaagtc

SEQ ID NO: 1975 - DNA, 694 bp, Mus musculus
acgtataatttttttattttcatgcaaaataaaggcacactttataacaccctttcaattttgacttacatgatttaaattcaaccctttataacaatagctcaatatctaatgttacattcatattcagactgaaccaagtgcagcaacaaatgcagcaaacctaaaatcaaggtgctacaaagttgcttctacatcaaaagacagacaagcgtctgatagagtaatttaattgaacatatatttacagacatacagctatcctaaagaaagacagacagatttaggaaagcagctatatctgcagaggaaggaaacagcatgttacagacagtcaattatacatagaacgtttgacaaacaccacagaaaacaaactctaatcatttaccagggtacaaaatttagcataaatcttttggcaaatgagtgcataaaggaagttttggggcctaagcagaattttaactcaaaaaataaatacttgaaaacataagcgaaatctaatacaattacgtaaattttaaaagtaagaaacttggaattacatttccattttagttatatatatttatgtatgtgtgtaaatagatatatagatatatccctgattcacattcttgactgaggcttttgaaagacaggggtgcattaaacaaatgaataaatatttcggaattatgacatgagctgc

SEQ ID NO: 1976 - DNA, 562 bp, Mus musculus
gatgggatacccagggttgatgttctgaagaaccacttggtaaaagaagggcgggtggatgaagaaattgcactaagaattatcaatgagggtgctgccatacttcggcgggagaaaaccatgatagaagtagaagctccaattacagtgtgtggtgacatccatggccaattttttgatctgatgaaactttttgaagtaggaggatcacctgctaatacacgatacctttttcttggtgattatgtggacagaggttattttagtatagagtgtgtcttatatttatgggtcttgaagattctatacccaagcacattattccttctgagaggcaccctggatggcaacccccttactgattatttaacctttaagcaggaatgtaaaattaaatattcagaaagagtctatgaagcttgtatggaggcttttgacagcttgccccttgctgcacttctaaaccaacaatttctttgtgttcatggtggactttcaccagaaatacacacactggatgatattaggagattagatagatttaaagagccacctgcatttg

SEQ ID NO: 1977 - DNA, 698 bp, Mus musculus
gagacaaagcctctctatgtaaccttggctattctggaactcactctgcagactaggctggtctgcgtgcgccaccaccgcccggctggctgcattagggtgtttattacagcaataaacactgtgaccacaagcaacttggagaggaaaggggtttttcatcttacaactctcaggtctctatcactgagaaagccaggacagaactcagggcagaaactaaatcagagaccatggagaagtgctggttactggcttgctcccatggcttgctcagtgtgctttatgtacaacccaggaacacctgcccaggggtggcactgcctagagctggctgaactctaccatgtcactcattaatcaagaaaatgctcaagatatgcctacaggccagttttataaaggcattttattaaagtttcctcttctcaaatgacttgctcatttaacaaggaaaattattgcaaccctttatccccaccatgattatagtcatttgacagacagggacaggcttgggcaacagtaagtagtctgcttgaaggcagatgccaaggaagtaaaatgggcaaggtttgtacccaggctgccaggctccaaggctgtacctcttgcttgctgtgatatgcagacgttagaagggaaggcagtgcttttaggcaagcttgtgacaagagtgaagaacttgattcaccctg

SEQ ID NO: 1978 - DNA, 510 bp, Mus musculus
gaaatgatagcctggatctaaacgtaggtaatgtggctatggggttgattcagggccacttgaagcagtttctaccctctgtcattccaagctttccacaagaagcgctgaggggctgatttgtccaactcctctctgtatgtcctggcatatgtgtggccagagcaagactcagtgcccttgagtcaggcgcccaggtttagtccaatcaactagaaccatgtggccggaaccagctttactcacctgaacagcaagagctggctataggatatgtacctggtaccagcatctatggcaattctgaaggtaggtggcgctcctatgatgggcctgtgccactcacaggtccctactttgaagaagggcagggtgaatcaaggtcttcactcttggcacaagcttgccctaaaggcactggcttcccttctaacgtctgcatatcacagcaagcaagaggtacagccttggagcctggcagcctgggtacaaaccttgcccattttactt

SEQ ID NO: 1979 - DNA, 673 bp, Mus musculus
gaaaatgtactaaaatttaatcatccataaaagctgtaatttaatctgacagtaaaacacaagaagcaatattagagttggtttagtatattatatattctagctttgaaagccatagaaatcagttatcccagtttttccctataaaagacccatttttccaaagcattatgcacaaacaattttaattagaatataatgacagatgatattttcataattttaaatataaaatgaagtcaatgactcaaaaaagttatctgctgcaatgagtttgagaggagatttcataatctatatcattacagatataaagtatgatggttcaattttttagtgcttgacagggaggagtcatgataaaaacgtcaatatgaaatcatttgattatagtagtacatctaacatttgaaatgcatccatgctcttctgtataattgtattagagtcaagtatcttatttcacatctgttataactgctattgcaaaggagaaatactatgtcttatttccaagagatatacacagagcaactttgtctccagggaacttgtgcaaaccaatataagatctaaattcttcacataatatataaaacaggagaagcctcttcagatttcgtttttgaagtctggaatgctggcactttccaattaggcaacagttcttcat

SEQ ID NO: 1980 - DNA, 529 bp, Mus musculus
tcccgggtcgactctcccgggattgtcaatatttaaacagagcgcatcatgcgtgagtacaagctagtagtccttggttcaggaggcgtggggaagtctgctctgacagttcagtttgttcaggggatttttgttgaaaaatatgacccaacgatagaagattcctacagaaagcaagtcgaggtagattgccaacagtgcatgctggagatcctggacactgcaggaaccgagcaatttacagcaatgagggatttgtatatgaagaatggccaagggtttgcactagtttattcaattacagctcagtctacgtttaatgatttacaagacttgagagaacagattttacgggttaaagacacagaagatgttccaatgattttggttggcaataaatgtgacttggaagatgaacgggtagttggcaaagaacaaggccagaatttagcaagacagtggtgtaactgtgcctttttagaatcttctgcaaaggcaaagatcaacgttaatgagatattttatgacc

SEQ ID NO: 1981 - DNA, 322 bp, Mus musculus
ccagtctacacatgggattttatttgtttgcttaaaggaaaaacaatttaattgtaatagaaataaaaaatcaaagataacaaacatttcttgactcacagatgcaaatgtaacaagcagctacagaagctaagaaacaaaatgaaatagaccatactgttgatttttcttctcaggttatatttttttaaaaaaagagagcactgttcaagttaggcagggaaggaaatgcagagtgagctcttgggaaaaacaaaaaaacaattaaaacctctaatgacataatcccattaaaacaaaaggccagcgaacggatagtcga

SEQ ID NO: 1982 - DNA, 347 bp, Mus musculus
ttcgctggccttttgttttaatgggattatgtcattagaggttttaattggttttttgtttttcccaagagctcactctgcatttccttccctgcctaacttgaacagtgctctctttttttaaaaaaatataacctgagaagaaaaatcaacagtatggtctatttcattttggttcttagcttctgtagctgcttgttacatttgcatctgtgagtcaagaaatggttggtatctttgattttttatttctattacaattaaattggttttcctttaagcaaacaaataaaatcccatgtgtagactggaaaaaaaaaaaaaaaagggcggccgcgacgcgccct

SEQ ID NO: 1983 - DNA, 565 bp, Mus musculus
aaattaaaattagatttcttcttctttttttttagttttatgtgtgttttgcatgtatatatgtatgtgtaccatttacattcctggcatgcacaggaattcagaatagggtattggatccctggaactggagttaaagatggttgtgaaccaccatgtgtgtactgagaaatgaacccagatcctctggaacgagagcaagtgcttttaaccactctccagcccctattagtatacattttcagaagcagattggactgcttagatttttaagttatcactacaagacacagaaatgggttctctctccccctccctccttctctcccttcctccttttcctccttccctccctctctcctgccctctctcctctctctctctttctctctctcgctctctcattctctcgctcttgggctctctctcttttttcttccctcaaactcacagagctctgcttccaactgctgggattaaaagtcttcaccaccacctcccagcttacacactgagatccctggagctcactgagagttctcctatcttggaatcaccactcctg

SEQ ID NO: 1984 - DNA, 523 bp, Mus musculus
cttggctcattcaaattatacaatccaagatgactgctccttggtaaggccaactttgttaagagggcaacccaaggtggtcccaaaggggaggtggcacaccccaacactctgtgactggagagaaacagccagacctatcaagccttggtggataataaaattagaggctctggaggcattcttacactaaagaagtcacaatagggtctctacatctctatagcactagttgccatagcaatgagagaaacagaacatctagaaacaagaatcagccaggagtggtgattccaagataggagaactctcagtgagctccagggatctcagtgtgtaagctgggaggtggtggtgaagacttttaatcccagcagttggaagcagagctctgtgagtttgagggaagaaaaaagagagagagcccaagagcgagagaatgagagagcgagagagagaaagagagagagaggagagagggcaggagagagggagggaaggaggaaaaggaggaagggagaga

SEQ ID NO: 1985 - DNA, 565 bp, Mus musculus
attgaaggtaaaccatccaagcagtttttattcattaatattcataaatacacacagcagcttcattagaaatttcaattttcctcttcagtttgaatgtggagtattaggagagccttttgcatgtcaaggtacaggaagcagagatcaccctgcactgctacctacatttacctgctagaagtaaaaattagttaagtggaaatgattatcatatatatttctctcttccttttgaatgtacacaatgtaacaagagtgacagacctgaaattacaatcaccacacaaacccaggatagctgttgtccactttcattggcaaatacagcacagaggacattgtcttcgagtggggaggtcatcaaagaggaggtggtggaggctcatttcctttattactctcttttaaatttaggttttctaaagcaacatctataggcataatatctacacagcccatagcaccaaaatctgccatctccccccgatcatccgcatctgaggacgagctctcttcgcgcactaacgtggaaagaaggagctcctggacaaacaggctgcgg

SEQ ID NO: 1986 - DNA, 564 bp, Mus musculus
aaacatgcactttactagcagttctactggtggactctcttcttctcagagttcatactctccaagcagtagggaagccatggatcctatagctgagctgttatctcagttatcaggagtgagacgttctgcagggggacagcttaactcttcaggcccttccgcttctcagttgcaacaactgcagatgcagctgcagcttgagcgacagcatgcacaggcagcccggcaacaactggagactgctcgcaacgcaagtcggcgcactaacacaagcagcgtcaccactacgatcacacaggccacggccacagccaacacagccaacacagagaacagcccgcaggccctccacaactcccagttcctgttaacaaggttgaatgatcccaaaatgtctgaagcagagcgccagtccatggagagcgagcgtgcggaccgcagcctgtttgtccaggagctccttctttccacgttagtgcgcgaagagagctcgtcctcagatgaggatgatcggggggagatggcagattttggtgctatgggctgtgtagatattatgcc

SEQ ID NO: 1987 - DNA, 449 bp, Mus musculus
catatatcattttctttttctctttttattgaataaagcagctttgaagcttatcagggccctgcccaacatttagtccaaaaaaaaaaaaatctgttatgaactttttaaccttgggctaacagccaagtattctgtacaagaaaaactgtaaaatatttcatagttttaattcttaagccattctcctttctggcatcctgtacacttctttaaaaaaaaaaagtaaaaatgacaaaaacaaatattaacaaaaatcagggacaatattttcaagcaacaaaaactggggtaagggaagcttattccaaaggtgtattggaaacgggtaacaacataataaaaattaagaattgcatagcgctgcacgtttatagccttcagcaaaacaaaacagtagctatttggtattgatacaaatccatctatttggtagttagtcacccaat

SEQ ID NO: 1988 - DNA, 472 bp, Mus musculus
acacacaaccaacacacagagagaaagaaatgcataaatctctccgtgcagggacaaagaggcctttaaccatggtgcttgttaacgctttctgaagctttaccagctacaagttgggactttggagaccagaaggtagacagggccgaagagcctgcgcctggggccgcttggtccagcctggtgtagcctgggtgtcgctgggtgtggtgaacccagacacatcacactgtggattatttcctttttaaaagagcgaatgatatgtatcagagagccgcgtctgctcacgcaggacactttgagagaacattgatgcagtctgttcggaggaaaaatgaaacaccagaaaacgtttttgtttaaacttatcaagtcagcaaccaacaacccaccaacagaaaaaagagtgtggagaaggagacttacagtgacattcagtatataaaatatgtacataatattgggtgac

SEQ ID NO: 1989 - DNA, 609 bp, Mus musculus
aattaaaatgcaattttattacaagactaaatcatttgattgctgctccaaagggataggtgctagtactttacagattctgaccaactaaatctagttttcggattcacaataaattaaaataacttaaatctttacaggttttgtggaaaaaatatactgcgtaaaactcaaacatgaatagttttcctgcagtttctcttttccaccaatttgaaaacaaatgagcattgtaagcacactacacaaatcatgatttgccatggctctgtgtttcataaaaaccctcctcattgacgactgaagttaagctctggacactgaattctctctccaggaccaagtttagatcaatgctggcagtttctgggtggctgtccagggactggtgacgagtctgcgccttgagcaaagttcctctgcccctcttggtgctgtttgctttccgtttaatggggcaaaaatggcccctgaccagcttgggctgttcacctgactctgtgagaggctgctgcccaactgggtgcacgtcggattcctcagagattttcagtctctggaactgaatctcaatgtccttagtagggctaccctgtttcagagggtggt

SEQ ID NO: 1990 - DNA, 506 bp, Mus musculus
gaaaaagaaactgccctcgaattcccggcctgctcacaactctgctgacttggatccatttaaattccgctggttgattcccatatctgcgcttcaagttagactggggaacacggcagggactgaaaataattccacgtgggagctgattcataccaagtcggaaattgaaggacggccagaaaccatctttcaactgtgctgcagtgacagcgagaacaaaaccagcattgttaaggtgattcgttctattctgagagagaacttccggcgccacataaagtgtgagctgccactggagaagacgcgtaaggaccggctagtacctcttaagaaccgagttcctgtttcagccaaattagcctcgtccaggtcgttgaagggcctcagaacatcctccagcagcgagtggcccagcgagcccagcaagggcaactcactggactcagatgagtgcagcctgagcagtggcacccagagtagcggctgccccgtagccgagagca

SEQ ID NO: 1991 - DNA, 887 bp, Mus musculus
gcatctcttagtgcctttttatttcagttgttttggcatatataaaggtcagaaagtgaatatatacatacaaaactctaaataccttcctaaaatggtttcaccactggccagtcgcgggggggattatgaaagtcttaattgttaaatatgtctaaagtgcatttttttttgcagctaatcaatagcagcatttgtttgtttttttttttttttttataaaaccttagaaaatattcagagcagttgaaaaagtcacaataaaaaagggcaacgtgatctggatacattcttctgcaagatgactcagacactgcgtctggaacagctttggataaatcaccaacacgagtaaaaacggtcttctggtgccggggctgtcagttcaaggtttcttgcgcttgggttgtgcgtggtgctgatatcccggtcccagctgagatcctgctctcatttcaacggcaacagagcaccttgtttctacatcggtccattcagactctgtaccatctggttgggcaggtgctagggtggacgatcttcgtttccgactaccagttggcaattcttgttttaaagtctcaatatcagtaaactgaaccgattgtccgccacctctcgtcttataaacatcacccttaatgactttagtctgaatctccccatcggaggctagttcctggtgggtcagcatgtacttctcacacttagctagcgccttttcatttgcaacagacactgtgatggcgtgagggacatgcggctgcatcactgtctcagtttgcacattagaggcaggcttatgatctacccatctgctccctgcagagcgggaccttctgtgtcgtacaggattggggtgttaggtagaggcgaggagagacaga

SEQ ID NO: 1992 - DNA, 564 bp, Mus musculus
aggatgtacagaagtagaagtgaaatctacggaggaggcttttgaggttttctggagagggcagaaaaagagacgcattgctaacacccatttgaatagagagtccagtcgttcacatagcgtgttcagcattaaacttgtccaggctcccctggatgctgatggagacaatgtcttacaggaaaaagagcaaattactataagccagctgtctctggtagatcttgctgggagcgaaagaaccaaccgtactaaagcagaagggaacagactacgtgaggccggaaacattaatcagtcattgatgacactaagaacatgcatggaggtcctgagagagaaccagacgtatggcactaacaagatggttccatatcgagattcaaagctaacccatctattcaagaactacttcgatggggaggggaaagttcggatgatcgtgtgtgtgaatccaaaggccgaagactatgaagaaagcttgcaagtcatgagatttgctgaagtaacccaagaagtggaagtggcaagaccagtggacaaggtgatatgtggcctgacacc

SEQ ID NO: 1993 - DNA, 732 bp, Mus musculus
cctttgttttggtttttttttttttttggtttttttttgttttgttttgttttgttttttggtttttcaagacagggtttctctgtatagccctggctgtcctggaactcactttgtagaccaggctggcctggaactcagaaatccacctgtctctgcctcccaagtgctggtattaaaggcatgtgccaccactgcccagcttatacccttaaaactcttaatgtgcagaatgactactgttttcctcatcaaatccagacaggtcacgcccatttgcttctatactcaaattcaccctacatcacacacacatgcactcacacacactcatacacactcacagaaacacacatatatactcacacatacaaactcaggcaacactcacaagtgtatacaccttcttgattctgtgaggttgttgtccatccagctctaagatctctctgtttccctcatactccacaaaactgagattacaaacacattggcaccatgtctagttttcaggtgggttctgggcatttgaactcaggtcctcatgcttgcacaaaaatcatttcaccactgagccatctcttctgtccctctaatttgttgaccttagacaaaagcctagcagcttaaaacaaatgttttggagaactcattctttcaccagcagcctttcaaggtttttccagccttttaaatctttaatttgtagagagaatgaacctgatcaagact

SEQ ID NO: 1994 - DNA, 596 bp, Mus musculus
tggcgcgccccagggatctctgggcgagtatctctttgagcgcctcactctcaagcacgactaggaggcctatgtgccttccaaggggctcccccctctgctctgcaccagcccgccctgggacctccacctgaatgaacctctcaagccactaggcagctttgtaacggccctggagcctctgtcaagtcttggaccaagtaaaaataaagctttttgagacagcaaaaaaaaaaaaaaaaaaaaaaaaaaagaaagcaggctaaggaggccacagtgaacaaggcagtaaggagcaccctcataataccatttaggagtcttgatcaggttcattctctctacaaattaaagatttaaaaggctggaaaaaccttgaaaggctgctggtgaaagaatgagttctccaaaacatttgttttaagctgctaggcttttgtctaaggtcaacaaattagagggacagaagagatggctcagtggtgaaatgatttttgtgcaagcatgaggacctgagttcaaatgcccagaacccacctgaaaactagacatggtgccaatgtgtttgtaatctcagttttgtggagtatgaggga

SEQ ID NO: 1995 - DNA, 697 bp, Mus musculus
gtttgagacgtgctctctacatagccttgactgttgtggaactcactgtgtccacaagtatctatacttaactttacaatgttagatcatgtgatctatgtgtgagattgcctttttagaaagttatattgcgcttactttaaattttttatggttttttttgtttgtttgttttattttggtgtcttgttttgttttgttttaatggtttttcaagacagggtttctctgtatagccctggctgtcctggaactcactttgtagaccaggctgtcctcaaactcagaaatccacctgcctctgcctcccgagtgctgggattaaaggtgtgcgccaccacgcccggctatatctgtatttatttatgtggtaattagggagataggaatttaagtaaccaactaaactctcgcccttctgtgctaggagtgctgggattacatgcctctatgcctggcctgcttgtgtgtgtagacatgtgttgctacatagatcagaggtcaacactgggtatcttgccagtcactgtccatcttactctttgagataagctctcttactaaatgcatagctcacccattatagctaggttaactgcttgtccacctttaggatggtatgcatccattatcatacctgacttttcagtgtggatgctggagataaaaagaacccgtgcttacatagcaagtacat

SEQ ID NO: 1996 - DNA, 644 bp, Mus musculus
taactttagagctcttcaagaaacctagaaaacacaagaaatctggctttcacaaagaaaaattgtgctacactgttcacataaataaatggaaataatcttataataaaatgaaaatatttaaaagtagcgataaacagggttctatgattgtttcctggtagtagatagtaactagtatgattgatcaaactgtatcaacacatactggcaaggacaaatgaagataaaactttaagagttaccccgaccaagttcttttaatcaaatcagtgtctgagaaacataaccaaccatgttttcaattttgggaaattaccaacatcagcttgagtaatatggcacacttaccagggtatgttcataaacatagttatcaataacatttccaaggtttgttccttcatccaacaggccaacggagtagttcgcatcgtcaataaatcctttcatctcagccgtattccacaaagccgaaagtcataaaccaggaaaaacaagagacgggccaccaagcctatgcctgggtccttagaatatgcaacaaactgtcaaaacagaagttcaatcaaactcagcattatttcagtaattaaaacatggatatattgagtgaatcactaaaattgtcaagtattcaattc

SEQ ID NO: 1997 - DNA, 569 bp, Mus musculus
gaatgattaagcatgtcttgagcctcttttctttctccttccactctttcaagattatgtttgagatgtttcacttcttcttgtaaagatgtaattcgtgcttgaaggtctccaatcatctcagaatcatgccctctgtctcttcgctcagcttccaatacagcttgcagcggtagtaatccttgtctgcttgtgacttggaattctctaaaattctgtttctttcctgtaattctctgttcagggactctagctgactaattgacttgctcatctctgtgtgactcttccttaatcttacagctgtgtctgattctgtcctaagtaagtcattcgcttcttctaactgcttctgtaactgtgtcagcttctcattagcaagctgtggggtctgacttgctttccgtaagtcttctaactggtcctttagtgtagaaacttcattttctatatttcttctcttctcattttcctgttccacttttctttggtactcattaattctatgttgtagcaacatcttttctttctcaatttgagacactgcagattctagatttcttctttga

SEQ ID NO: 1998 - DNA, 642 bp, Mus musculus
  misc_feature (1)..(642): n is g, c, a or t
aaacatttcctattccaaaagcttttgttggcaatcagctaccttttgtaggatttacatattatagcaatcgtagatacttaccttcagcaaatgccagtgagaacagatctagctccaatgtggataaaagcttgcaggaaagtttacagaaaacaatctacaagcttgaagagcaactgcataatgaaatgcaattaaaagatgaaatggagcagaaatgcagaacttcaaacttaaaactagacaagataatgaaagaattggatgaagaggggaatcaaagaagaaatctagaatctgcagtgtctcaaattgagaaagaaaagatgttgctacaacatagaattaatgagtaccaaagaaaagtggaacaggaaaatgagaagagaagaaatatagaaaatgaagtttctacactaaaggaccagttagaagacttacggaaagcaagtcagaccccacagcttgctaatgagaagctgacacagttacagaagcagttagaagaagcgaatgacttacttaggacagaatcagacacagctgtaagattaaggaagagtcacacagagatgagcaagtcaattagtcagctagagtccctgaacagagaattacagganagaaacagaattttag

SEQ ID NO: 1999 - DNA, 720 bp, Mus musculus
gttgcaaacagacaaagtattttatttagacatgattttgtaaaccatcacactgtactttttaattccacaagaacattatttccctcccacacacttacagtaagccctgtgcaaagtcaaaagagtgaatacaagagtaaagacaaacaagttggagtttccttaaagtgtcaaattgtgctacttgatacaaagactcacaaccacctgtaccataaaaggttacatgccacaaaacattaattaataattttaatatatagtaaaacacatttatttaaaaaaccatcaggattaattttattataaacaagtgaattatccagaggaatatttattaaaactcactaaaacccagcaaatattgcaactgaaataaaaatgtatacccaaacaaaactataaaaatttacatgtaaacaaaactatcattaaggaccaaggagtgagggagggcagagggcgtttcccgagtctcctcactccctgatgttctgaaggagtttcagcagatgggactcgatggcctgttggacacctctgtagcccaaagctacagctaggtccatagaattatagccagagtctgtttcaattgttgggtcagctccattttccaacagcatcttcacgcacttcacgtggttcccatggacagcgtaaagcaaaggtgtccctccgttccagtcatattcattgacgtcaatggatagtcga

SEQ ID NO: 2000 - DNA, 739 bp, Mus musculus
  misc_feature (1)..(739): n is g, c, a or t
ttgacgtcaatgaatatgactggaacggagggacacctttgctttacgctgtccatgggaaccacgtgaagtgcgtgaagatgctgttggaaaatggagctgacccaacaattgaaacagactctggctataattctatggacctagctgtagctttgggctacagaggtgtccaacaggccatcgagtcccatctgctgaaactccttcagaacatcagggagtgaggagactcgggaaacgccctctgccctccctcactccttggtccttaatgatagttttgtttacatgtaaatttttatagttttgtttgggtatacatttttatttcagttgcaatatttgctgggttttagtgagttttaataaatattcctctggataattcacttgtttataataaaattaatcctgatggttttttaaataaatgtgttttactatatattaaaattattaattaatgttttgtggcatgtaaccttttatggtacaggtggttgtgagtctttgtatcaagtagcacaatttgacactttaaggaaactccaacttggttgtctttactcttgtattcactcttttgactttgcacagggcttactgtaagtgtgtgggagggaaataatgttcttgtggaattaaaaagtacagtgtgatggtttacaaatcatgtctaaataaatactttgtctgtttgcaaaaaaaaaaaaaaaaaggggcggncgctcttaga

SEQ ID NO: 2001 - DNA, 666 bp, Mus musculus
ggttctgagatcatatatttatttaaaaaaataaaatggattgacaaagttaccacattatctgcatgctatcaagatttcccaagcccgtgagaaacaccatttcttgattgataataaaatcacttcctcaacaatatacagacaggaaaccttccatctaaatttaaggtccttatcactgctctcacctcacaagctagtaagatgtatgtgccacaagctgagctccttacaaaagaacatctgagaagacaataaacaaggtgttacgaaaagatgatgatttgttaaaatcataaagcaacaatcttttggcctgcaaaaattttacattagatttaccaccagtggggatgtgctcctatgatagtgatattctgaataatcacaaacactcggtagtttccctgcatgctttctggagccaaaccctgtttgacaacatattcagtttataggatggggcctgaaattcccattctaaacaggacagttagggagtgttaccagtaacaaagaatgaaagttatatgacattgattattatgaattatatttgttcttatccacccctgattgtccttaatatgttcgaattccttcttgcaggaaccatgagcttagtagaacccagacacatccttagtgatgattagagtgagc

SEQ ID NO: 2002 - DNA, 553 bp, Mus musculus
agttgctatttctaggcttgtgcttgttgggttcgggcccccaggtaaatagccacagaaggctaccaaacaagataaataattgtctccaagtagaagaaaaccaagctccatgagtgggcatcggtcaacaaggaaacgatgtggagattctcacccagagtcccctgtgggctttgggcatatgagtactacagggtgtgtattaaataaattgtttcagttaccgacaccaccactgtcaagacaccagttaaaacggctagaagaacacaggtatcagagtgctggacggtcccttctcgagcccttaatgcaaggatactgggaatggctagttggaagagtaccctcatggattgccccaaatctcatcaccatcattggactatcaataaatatctgtacaactattttgttagtcttctactgccctacagctacagagcaggcacctctgtgggcttatattgcctgtgcttgtggccttttcatttaccagtctctggatgccatagatgggaaacaggccagaagaactaacagtagctct

SEQ ID NO: 2003 - DNA, 387 bp, Mus musculus
aattcttccatctgactttatttccaaatacactttcttaaaaaaaaaaaaaaaaagaaaaaaagaaagaaagaaagaaaaagaaaagaagcaatacactttctgggggaatgacaaatatcagtattaggaaatccaattatacaaaaaatactacatctagtctggggtagatatatttattttttggtaacatacattaagtggcactaattacacagtaactataaggtaactaacatgagaccacagaactgtaactctgcaacagctgcgtggacttgggcctttctggctgagcaagatttcaaaaaactgaatacccaccccagagctctggcaatggagtctgttaacaaggaaagctctgaagtagggatagtcgaa

SEQ ID NO: 2004 - DNA, 408 bp, Mus musculus
tacttcagagctttccttgttaacagactccattgccagagctctggggtgggtattcagttttttgaaatcttgctcagccagaaaggcccaagtccacgcagctgttgcagagttacagttctgtggtctcatgttagttaccttatagttactgtgtaattagtgccacttaatgtatgttaccaaaaaataaatatatctaccccagactagatgtagtattttttgtataattggatttcctaatactgatatttgtcattcccacagaaagtgtattgcttcttttctttttctttctttctttctttttttctttttttttttttttttaagaaagtgtatttggaaataaagtcagatggaagaattaaaaaaaaaaaaaaaaaaaaaaagggcggccgc

SEQ ID NO: 2005 - DNA, 548 bp, Mus musculus
gacatgaagtgtgtttattaggaagaacactccaagcactcacaaatggctttcacaaacacttagcctaggctggaacacaaaaggatatcacaacagagtccattgggttttacttgtttacatcaccaaagaatgttcatggcagttaattttcaggctgtaaaaactacatctatggcaccaacatggaatttaaaaacaagttggatttcaaagtaccccaaatgccaaaaactgaaagtactatcaaacgggtctccaaagaagtctaggatgctgtgatgcaggcctgtccatatacctccctggaccctcaggtgctacctacaggcctctgctcatttcccataaacatacctcaccatcccaggacaacaaaggaatgccatgtaagaaacaaacaagactggttatctcctaccacaaacaggaatacagaaaacatggggccagattcggcaatacagacaggttagtgatgtttcgagagggctctcccaggcactgagatgcagcttagaaatatgctggagtaagctctgtct

SEQ ID NO: 2006 - DNA, 580 bp, Mus musculus
gccaagggagccgtccatcagctctgccagagcctggcagggaagaacagtggcatgccccctggggctgctgccattgctgtgctccccgttaccctggataccccgatgaacaggaaatcaatgcctgaggcagacttcagctcctggacacccttagagttcctggtggaaaccttccatgactggatcactgggaacaaacggccaaactcaggaagcctaatccaggtggtaaccacagatgggaagacagagcttactccagcatatttctaagctgcatctcagtgcctgggagagccctctcgaaacatcactaacctgtctgtattgccgaatctggccccatgttttctgtattcctgtttgtggtaggagataaccagtcttgtttgtttcttacatggcattcctttgttgtcctgggatggtgaggtatgtttatgggaaatgagcagaggcctgtaggtagcacctgagggtccagggaggtatatggacaggcctgcatcacagcatcctagacttctttggagacccgtttgatagtactttcagtttttggcatttggggtac

SEQ ID NO: 2007 - DNA, 561 bp, Mus musculus
gagtgggtctcaggctggcctccaatttgactaacttgaacttctgaccctcctgcctccaactcctgaatgctaaaattacaagcatatatctggggtccccccacccctgcttccttttaaaatgttttaaatttatatttatttattcattgattgagggtttatttgtgcatgtgtgaggctacagcgcctatggaagtcagaggacaacttgggacattcagttctctcctgctgtgtagatagatattcaggctgtcaggtttggtggcacaagccccaccccactaccagctgagctttctcattggctcttttttagttcctttatagaggttttgttttgttttttgtttgcttgtttttttgtttttagtgtgaccccagtcaattctgagtctgaaggcaaatttttattttccaacccactttttataccattttaattacatgcaagtattttgggcaagcaatgactgatgaaacttttagctgtgatgaagtccaatttatctccaccccatcaccatgttgcttgtgtttgctattttatctgac

SEQ ID NO: 2008 - DNA, 553 bp, Mus musculus
tatcatggagatatgtgatacaacgattatctaggagtcagttaaattctaatttagatttctgggctctgagctggcctgtagcttactgaggtggactccgctatctctagtggactcaccccaggtttaaagatcttcagtctaggggtaacacacttggcaaaggacaccaaggaacaggaagaaacacttggacaggggggtgctggtgcgacttgaagaagctcatggagaagggaggaaagagtgtcttcttgccaggtctacaaggatgtgaaaaacctggtcagggcagcaaacttaacagtgagacttaatagtagggggctgtgtagaagtatggcagatgtgatagggctagaaacatggcctttagtagctagcatgggagactgacttggagaactgacagggccaggttgtacagaggaaggaaagctactggtcaccagcctgaagcctcaccagaccaacaaaagaattacccaagagatactctgaagatagccaggtattcttggaagaaacctgaaaagatagccacatgacc

SEQ ID NO: 2009 - DNA, 482 bp, Mus musculus
aaggcattacaatatttattgctgtttttgttttgcttcaaaaagcaacgggattttaccaaaggcaagatatgatttaggacttgaagggggaaataaaagcaatactaagttctaagtgaaagtaaattgtaattgctgaagcctaagaactgagactcagctatgtttgtctctgagcaggggcttagggaagcaagtttgtgagtgggttagtgactggcaaggcttctggtgacttgagaaagataccaagttggtctctgtgtctacaggagacagcaggacctggcttgggcctctgtacttgctacaggaccttataactcccagagccatgtacctgccctttttccatcactggcactttgtgtccaatatctccctgtgctgttccactattgtccctatccactctgaggttttctgctttgcttcctcccagttgacaagtggctcatagcccagatctcgctgagctt

SEQ ID NO: 2010 - DNA, 631 bp, Mus musculus
aagggttaccctatatcataccagctcccactgtcatctgtttcctgtgttgaccatggctggatggagctgcctggtgacaggagcaggagggtttgtgggccagaggatcatcaagatgttggtgcaggagaaatgtatattgcaggaggtcagagctctggacaaagtattccgaccagaaaccaaggaggaattctccaagctgcagacaaagaccaaggtgacagtgttggaaggagacattctggatgcccagtgcctgaggagagcctgccagggcatctctgttgtcatccacactgctgctgtcattgatgtcacaggtgtcattcccaggcagaccatcctagatgtcaatctgaaaggtacccagaacctattggaggcctgtgttcaagcaagtgtgccagccttcatcttctgcagctcagttgatgttgcagggcccaactcgtacaagaagatcgtcctgaatggccacgaggaacagaatcatgaaagcacatggtctgatccatacccatacagcaaaaagatggctgagaaggcagtactggcagccaatgggagcatgctgaaaaatggtggcactttgaatacttgtgccttaagacccatgtacatttat

SEQ ID NO: 2011 - DNA, 562 bp, Mus musculus
acattaggaaacttttattgacttaagctggcattctagttttgtccaagtcttaataggtgcctttcttatcaatctgcgtgtgtttttaccaccacagaatcatgacgacttgcacttatcattgtcctgtaataattaaaatgatgttcaaataatcagcaagttacttctctaaaatacttaaaagatgttctgaggagtgcttccaagttctatgtataaataatgattgatacatttaagagccatttgatgctgaagataaatatttcttatataaaacattgttataacataccattgtcctaatgaggctgttattagatatatttttatactaaagaataaagctttatctttgtagtaattttatttatagaactcttatcaatgaagaactctgtatccaacaccagaaagcaggcatactgcaagtgacattctgtagaggaagcaaaaaaagatggctgcaagaaaagagaccaccgtaagtttatatcagacattctttatataaacagtccattctcagcagcagaatcagatgcagagcaaatgc

SEQ ID NO: 2012 - DNA, 438 bp, Mus musculus
tctgttcccaaaggcttcgtggcaaagtcatccgatgaagcttacgcaattgccaaaaaattaggatcaaaggatgttgtgataaaggcacaggttttggctggcggcagaggaaaaggaacatttacaagtggccttttggaggagtgaagattgttttctctccagaagaagcaaaagctgtttcctcacagatgattgggcaaaaattgattaccaagcaaactggagaaaagggcagaatatgcaatcaagttttggtctgtgagcgcaaatatcccaggagagaatactactttgcaataacaatggagaggtcatttcaaggtcctgtactgataggaagtgcacaaggtggtgttaacattgaagatgtggctgccgagaaccctgaagccattgtaaaggagcctattgatatagtggagggcatcaaaa

SEQ ID NO: 2013 - DNA, 558 bp, Mus musculus
ctaaaaacaggtctttattttgaaaaatagaacaggaattggtaagtagaggtcacgttagtgtgactccacctcacagagttctcagggtggctgtgtgggaagaagtctcggtctctaccaccatgactgtggagagagaatggagccatgctgatggcgtcgccttgctcaagctggattgactgtgtgtgatctgtctgactgtcaggtgcttaggggctgagccatctgtgtcaagtaatgctgaaagtctgcaccccatgatgggcatggggagctgccatgagctgagttctctccgttgccgtgggccacagctgcctacacaggaccttcttgaggacgtcagggaggaggccgaccgtgacaagcagtatgatacccagccaggcaggcccactggacagcatggatatgaacacatagtacatcctctggtaactgaggaacggccttcagtgtgacagtgagcaccatcacagtgaacaccagcgtcccgaaggtccagttcccaaacatctgtccgttgatgggcacggttggttctcaaatatg

SEQ ID NO: 2014 - DNA, 588 bp, Mus musculus
gtacctctgcatcctggtgagcaaggccctgatcaacacggtgctgaagtacgtgtggcagagtgagcccttccgagatgagccatggtacaacgagaagaccgaatccgagcgccagaggaatttgttcctcagggtcttcaccgacttcctggccttcatggtcctcttcaattacatcatccccgtatccatgtacgtcaccgtggagatgcagaagttcctcggctcctacttcatcacctgggatgaggacatgtttgatgaggaaatgggggaagggcctctggtcaacacatctgatctgaatgaggagttgggacaggtggaatacatcttcactgacaagaccggcacgcttacagagaacaacatggccttcaaggagtgctgcatcgagggccatgtctacgtaccccatgtcatctgcaatgggcaggtccttcccgactcttctggcattgacatgatcgattcttcccccggagtctgtggaagggaacgggaggagctgtttttcagggccatctgcctgtgccacactgtccaagtgaaagatgaccattgtggggatgatgtcgatggtcc

SEQ ID NO: 2015 - DNA, 586 bp, Mus musculus
tgggctcgggcggcgtgggcaagtccgcgctcaccgtgcagttcgtaacaggttccttcatcgagaagtacgacccgaccatcgaggacttttaccgcaaggagatcgaggtggactcgtcgccgtcggtgctgtttttcttggacaccgcgggcacggagcagttcgcctcaatgcgggacctgtacatcaagaatggccagggcttcattctcgtctacagcctggtcaaccagcagagcttccaggacatcaagcccatgcgggaccagatcatccgcgtgaagcggtacgagcgcgtacccatgatcctggtaggcaacaaggtggacttggagggtgaacgtgaggtctcctatggcgagggtaaggccctggccgaggagtggagctgccccttcatggagacatcggccaaaaacaaagcctcagtggatgagctattcgcagagatcgtgaggcagatgaactacgcggcacagcccaacggcgacgagggctgctgctcggcctgcgtgatcctgtgaggcgccgtctgccgccgggcgctggccacgctctgtgcacaaagccaaacgcacccgat

SEQ ID NO: 2016 - DNA, 566 bp, Mus musculus
caggtttgaaacttttgcttgccggtgtcaagcagccaatacagagccttaatggctatttaaacggggaaatatgcatgaaccaaaatcaacgaggaacgtacacgctgtatagagccatttttccaccggggtctcagatgctctgcaacgtacaccctctcagaccctggctgaaggctggggatgctggctacacaagtcagccaggttcctcggacatcccagccaagacaacaaagtcgtctccaatctcaaagcaagaagacaatcacattaagagaatcgggtgcgtttggctttgtgcacagagcgtggccagcgcccggcggcagacgcgcctcacaggatcacgcaggccgagcagcagccctcgtcgccgttgggctgtgcgcgtagttcatctgcctcacgatctctgcgaatagctcatccactgaggctttgtttttggccgatgtctccatgaaggggcagctccactcctcggccagggccttaccctcgccataggagacctcacgttcaccctccaagtccaccttgttgcctaccaggatcatggg

SEQ ID NO: 2017 - DNA, 2484 bp, Mus musculus
atggaggagtcttcagtgacagttggcacaatagacgtttcttatctgcccagttcatcggaatacagccttggccgatgtaaacacaccagtgaggactgggttgactgtgggttcaaacctaccttcttcagatctgcaacactgaaatggaaggagagccttatgagccggaagaggcccttcgtgggaaggtgctgctattcctgcacgccacagagctgggaaaggtttttcaaccccagtatcccatctctgggtttgcggaatgttatttatatcaatgaaacgcacacaaggcacagaggatggctggcgagacggctgtcttacatcctttttgttcaagagcgagacgtccataagggcatgtttgccaccagtgttactgagaatgtactgagcagcagcagagtccaagaggcaattgctgaagtggctgcggagttgaacccagatggatctgcccagcagcagtccaaagccatccagaaggtgaaaaggaaagccaggaagatcctccaggagatggtcgccaccgtctccccagggatgatcaggctgactggctgggtgttactaaagctcttcaacagcttcttctggaacattcagattcacaagggtcaactcgagatggtcaaggctgcaactgagacgaacctgccgctcttgtttctgccggtgcacagatcccacattgactacctgttgctcaccttcatcctcttttgccacaacatcaaggcgccgtacatcgcctcgggcaataatctcaacatccccgtcttcagtaccttgattcacaagcttgggggctttttcataagacggaggctcgatgaaaccccagatggacgcaaagacattctgtacagagcgttgctccatgggcatgtagttgaactcctccgacagcagcagttcctggagatcttcctggaaggcacccgctcccgcagtggcaagacctcctgtgcccgggcagggctcctctcagtggtagtggatactctgtcgtccaacaccatccccgacatcctcgtcatacccgtgggcatctcgtatgatcgcataatcgaaggtcactacaatggcgaacagttgggaaagcccaagaagaacgagagcctctggagtgtggcgagaggcgttatcagaatgctgcggaaaaactacggctacgtccgagtggattttgcacagccattttccttgaaggaatatttagaaggccagagtcagaaacctgtatctgcccccctttctctggagcaagcactgttaccagcgatccttccttcaagaccgaatgatgttgctgatgaacatcaagacctatccagtaacgagtccagaaacccagcagacgaagccttccgacgaaggctgattgcaaacctggctgagcacattctcttcaccgccagcaagtcctgcgctatcatgtccacccacattgtggcctgtctgctcctctacagacacaggcagggaatccatctctccacgcttgtggaagacttctttgtgatgaaggaggaagtcctagctcgcgatttcgacctaggcttctccgggaattcagaagatgtcgtcatgcatgctattcagcttctggggaactgtgtcacaatcacccacacgagcaggaaagatgagttttttattactcccagcacaactgtcccgtcagtctttgaactcaacttctacagcaatggcgtacttcatgtgttcatcatggaagccatcatagcttgcagcatctatgcagtcctgaataagaggtgctctggagggtccgctggaggcctcggcaacctgatcagccaggagcagctggtgaggaaggccgccagcctgtgctaccttctctctaacgaaggtaccatttctctgccctgccagactttttaccaagtttgtcatgagacagttggcaagttcatccagtatggcattctcacagtggcagagcaagatgaccaggaagatgtcagtcctggccttgcagaacagcagtgggacaagaagcttccggaactgaactggagaagtgacgaggaagatgaagacagtgactttggtgaggagcagcgagattgctatctcaaggtgagccagtccaaggagcaccagcaattcatcacctttcttcagaggcttctaggtcccctgctagaagcctacagctctgctgccatctttgtccacaacttcagcggtccagttcccgagtctgagtacctgcagaaactgcacaggtaccttatcaccaggacggaaaggaacgttgccgtgtacgctgagagtgccacatactgtctcgtgaagaacgctgtgaaaatgtttaaggacatcggggttttcaaagagaccaagcaaaagcgagtgtctgttctagaactgagcagtactttcctacctcagtgcaaccggcagaaactcctagagtatattctgagttttgtggtgctgtag

SEQ ID NO: 2018 - DNA, 788 bp, Mus musculus
catagttgtgcagtttttgaactgaggtgtttgtgaggcttatcattactctttagactatctttactctttttttaaatgtaattcttttgagaattcctacatgagtgccgcatgtacatcatttccacccttacctccacccacctgcctgctacccctcaataacttctctggggtctcccactccctctcagctttatcactccttttataattatcaatgttacacacacacacacacacacacacacacacctcattatatgcatatagactttcaaaataatatgactttcattctctgctcttccctgttcaagaaacaactacatcttcttgtgcaatgccagccttgtcccgtagacaaactggtgaaggtcggtgtgattggatttggccgtattgggctcctggttaccagggctgcattctgctctacacgtggcacactggagattgtggccatcaacgagcctcttcattgacagcaactacatggtctatatgttccagtaggactccaccaatggcaaattcaacagtacagtcaaggctgagaatgggaatcttatcatcaacgggaagcccatcaccatcttccaggagcgagatcccactaacatcaaatggggtgatgctggtgctgagtatgttatggagtctactggcgtcttcaccaccatggagaaggctggggcccacttgaagggtgggggcaaaagggtcatcatcttcgccaacccttctgccaatgccccaatgtttgtgaagggtttgaactatga

SEQ ID NO: 2019 - DNA, 584 bp, Mus musculus
agatgctcagtgacgggggccaagttgggacaggtaggccttgggtgggtggtctagggtttcttactccttggaggccatgtaggctgtgaggtccaccaccctgttgttgtagctgtattcattgtcattccgggaaatgacctttacaaagttgtcattgagagcaatgccagccccagcatcaaagatgaaagagtgggagttactgttgaagttgcaggagacaaccttttcctcaatgtagctcaggatgccctttagtgggccttcagatgcctgcttcaccaccttcttgttgtcatcatgcttggcaggtttctccaggaggcatgtcagatccacaatggatacattggtgttaggaacacagaagtccatgccagtgagcttcctgctcagctctgggataaccttgcccacagctttcgctgcaccagtgaatgaagggatgatgttctgggcagccccacgaccatcacgccacagctttccagaggggccatccacagtcttctgaatggtagttacggcatagaccgtggtcatgagctcttctacgatgctaaaggtgtcatggatag

SEQ ID NO: 2020 - DNA, 625 bp, Mus musculus
aaaagagtttatttgccttcacacgtgggttgctacatacattcacagcagtgatgggctgcagttgggtattccagttgtgctccgacagacatcccagctctcatcctgatcagtgagccagtgcgcctgctgactggttctcggtgggaagtccacagtgactgggaggacccttagtctccattttcatcactggctttctcggggatggcttctaggctccggcgtggcttctgggcctcggagttttcagtgcctggtttgttcagtccacaggaaacagctgcaaagtggatctgcttcaggttctccagggtctcattcttagcatatttcagaagatccgcttgcccctttaagattgtaatattccaggtaaagctctccactgccttctgtagtttccgttccttcagcccctccttggtgcctatgctgtgcaagtgttcatgaaattccatggctgccttctgacagtgcacgatcttttcatacacagcgtctgcattttcaatcagtgccttgagggactgcatcatctaataaagacagggcaagaggtttccagttcctagataaaagaggaaggaagtagaggtggtctcccatctcggatagtcga

SEQ ID NO: 2021 - DNA, 582 bp, Mus musculus
agatgggagaccacctctacttccttcctcttttatctaggaactggaaacctcttgccctgtctttattagatgatgcagtccctcaaggcactgattgaaaatgcagacgctgtgtatgaaaagatttttttctgtcagaaggcagccatggaatttcatgaacacttgcacagcataggcaccaaggaggggctgaaggaacggaaactacagaaggcagtggagagctttacctggaatattacaatcttaaaggggcaagcggatcttctgaaatatgctaagaatgagaccctggagaacctgaagcagatccactttgcagctgtttcctgtggactgaacaaaccaggcactgaaaactccgaggcccagaagccacgccggagcctagaagccatccccgagaaagccagtgatgaaaatggagactaagggtcctcccagtcactgtggacttcccaccgagaaccagtcagcaggcgcactggctcactgatcaggatgagagctgggatgtctgtcggagcacaactggaatacccaactgcagcccatcactgctgtgaatgtatgtag

SEQ ID NO: 2022 - DNA, 434 bp, Mus musculus
ctagagagaaagagaaacagcacatttctccccaaaacaagtgttctggtagagcaaagggcaagtactagactgttcgtttgcaaattctaaagatgcccccatgagtactgctggttcaaagttcctgcctttctcaggtttatccattgctggactgcaggtgctgatggacaatctccctggatgctactcttcatactaccaaaagggccaagaattggtccaaacagaaaggaccaagagctggactcttggccctctttctagctcccaggcagctaaacaggggagcagggctccctgcagccccctccccagcctgtgctgtgcttctccagggtatacggtcatcattcccctgtatcatctgtgtccagtcttttccagatgcactccatccattctagaatgtcaagagcagggatagtcga

SEQ ID NO: 2023 - DNA, 457 bp, Mus musculus
tgctcttgacattctagaatggatggagtgcatctggaaaagactggacacagatgatacaggggaatgatgaccgtataccctggagaagcacagcacaggctggggagggggctgcaggggagcctcgttctcctgtttagctgcctgggagctagaaagagggccaagagtccagctcttggtcctttctgtttggaccaattcttggcccttttggtagtatgaagagtagcatccagggagattgtccatcagcacctgcagtccagcaatggataaacctgagaaaggcaggaactttgaaccagcagtactcatgggggcatctttagaatttgcaaacgaacagtctagtacttgccctttgctctaccagaacacttgttttggggagaaatgtgctgtttctctttctctctagaaaacaaaaaaaaagggcggcccgcaaaaacac

SEQ ID NO: 2024 - DNA, 683 bp, Mus musculus
  misc_feature (1)..(683): n is g, c, a or t
gaggttgtatgtgtatctgctttgttaggaaaacaatgctgagtgcctgccccttcctgtcggtgccctacaccctgaggaaagccatagacaagcctggaaaaaggtcagtcgagggagacggagagaagctcatatgtcatgaggcctataagatggtgcagctccagagggtcccctggggtctggagcttccacgtcaactgtccacaagagcaggctgtggaccattcaacaagatcccactcgaagccaagggcctgctccagcccctactcttgcctcacctcttctgggcaaggaaacctgaggggcccagcccatgtgtccatggcacagcacctgatgctccacctctactgtcagagcagaaagtctctccagtccgtcaagctccccttatcacgagtttgttacaaatgatgaaagtagaaaaacaggtggtgatgtcagacacagctgggggtggtgaataccagaagtccctgtgcctgtggtggtcttcaggggtcttggtaaagaagcctggtgtggtctatttctgagaggttctcagggctctcccaccagtctctacatgngcgctagcctgcaaatatcacatccgtaaaacatgttagaggaaatgctctttagatggagagcgtgcccttcttcacaactgtcagtggctgttcaacaca

SEQ ID NO: 2025 - DNA, 566 bp, Mus musculus
tcaaagacaaaagcctgcctcctcaccctgcccccgacactacccacaacaccaaacacatgaccaacaactttcatactgggctttttctgacaggaagtcaaaatcagaccaagtggcttgggtgtgctcgcatggtctctggaaaacataagagggaacatggccaggcaccccaccctgcaagatggcagctgtgttggaacagccactgacagttgttgaagaaggggcacgctctccatctaaagagcatttcctctaacatgttttacggatgtgatatttgcagggcagcggccatgtagagactggtgggagagccctgagaacctctcagaaatagaccacaccaggcttctttaccaagacccctgaagaccaccacaggcacagggacttctgggtattcaccacccccagctgtgtctgacatcaccacctgtttttctactttcatcatttgtaacaaactcgtgataaggggagcttgacggactggagagactttctgctctgacagtagaggtggagcatcaggtgctgtgccatggacacatgggctg

SEQ ID NO: 2026 - DNA, 523 bp, Mus musculus
aaattctattgaatttaatagaagatgaaaaagacacaaagaaatatacacatcaatcatttctgaacatgccattacattaaaattaaattactaaaactcatatttaaacagaataaatcaatattaaaatgtctgctataaaaatgtgaaatgtcaactgcaatataaaaactgcccaaacacaaatcttataaacaacaaaatccgcaatccaagcaactgaaaacaatcaagaactaagtggggaaaaaagaatcaaaaggaaaggacttttattgtaaattataaaaacaggatatgtttcttggcgtcttgtattagcattcatttcccatcatctttacaatcttgcccagcttgctttttgttatcctaagtagtctcccgcaatctataaccccaaaacacaaatggaggaagaaagtgtctagaaggttcttgtgagacacattactagagaaattaactcagtaaacataggaaaatttagttttcaaagaaataaaacaaataataaaac

SEQ ID NO: 2027 - DNA, 751 bp, Mus musculus
  misc_feature (1)..(751): n is g, c, a or t
gctccagcccccggaagcgttctctccccggccgcgtttctttcctgtgcgaggccgggctacggctctcccatcgtctctggtcctgcctctgggttaacaatcaagatggtacatgctgaagccttttctcgtccattgagtcggaatgaagttgtcggtttaattttccgtttaacaatatttggtgcagtaacgtacttcactattaaatggatggtagatgccattgaccccaccaggaagcagaaggtagaagctcagaaacaggcggaaaaactgatgaagcaaattggtgtgaaaaatgtgaagctttcagaatatgaaatgagtattgctgctcatctagtagaccctcttaatatgcatgttacttggagtgatatagcaggtttagatgacgtcattacagatctgaaagacacagtcatcttacctatcaaagagaagcatttgtttgagaattccagactactgcagcctccaaaaggtgttcttctgtatggacctccaggctgtgggaaaacattaattgccaaagcaacagccaaagaagcaggctgtcggttcattaacctccagccttcgacactgactgataagtggtatggagaatctcanaaactggctgctgctgttttctcccttgccacanagctacagccttctatcatatttattgatgaaatagactctttcctacgaaatcgntccagttctgaccacgaagctacagcgatgatgaaagctc

SEQ ID NO: 2028 - DNA, 590 bp, Mus musculus
gggttgtaactctttattaacagtacgtttggaagtagataaggcaatatgtctgtatggttgctagcattttcccaggatgaagaagccagcttggttgttttaagaagatcttctgagccctgtcctccccagctgtaggcacagtccctggggtttatcacgatcttcttgcagacggcacacctggctcagttggtcagagtgatctcattacttactacttgtcagacctaagtgtctaaggccaaatatggtcaaggacttgagtttaagaatgctaaaggtatataaaaaccatcttctgttagaaccaaatgatggaagcaagcatgccctttttttaaattggcatttattttctgagatcgggtcttgctaggcagcccaggttggccttgtgtcagacactcctggctcctggattctttagatgcctccatcagactgggttctttagatgcctccatcagactacttcgtcattgtatttctcagttcgctcagggcaagcggcagtctctgggctgctgtggcaggtgccaccactgcatttaaaagttaaaatttcttcaaatattcccatcaag

SEQ ID NO: 2029 - DNA, 638 bp, Mus musculus
aacttctgcagtaatggttcacactctccagtcctctagtaacaaaatatccctctgtttccagagctgttgatgacgagatcgaggccaacattgaagagattgacgccaatgaggaggacattgacgatggattccgaaggctctttgttcagctggctggagaggatgcagagatctctgcctttgagctgcagaccatcttaagaagagttctagccaaacgccaagacatcaagtcagacggcttcagcatcgagacctgtaagatcatggtggacatgctggatgaagatgggagtggcaagcttggcctgaaggagttctacatcctctggacgaagattcagaaataccaaaaaatctaccgggaaatcgatgtggacaggtctggaaccatgaattcctacgagatgcggaaagcactggaagaagcaggtttcaagctgccctgtcaacttcatcaagtcatcgttgcccggtttgcagacgacgagctaatcatcgactttgacaattttgtgcggtgtttggtccgtctggaaacgctattcaagatattcaagcagctagaccctgagaacactggaacgatacagctcaaccttgcttcgtggctgagtttttcagtactctga

SEQ ID NO: 2030 - DNA, 549 bp, Mus musculus
ggactcaacagatatatcaggatttattggtcctcagaggcacacctagtcccttcccagcccccgctatcaagaatggtgtcccagatgatctgggacatcagaccaaagattggggtgaccagcgaccaatgaccttcctgatccaggagctgtagggggctacagcagtggccacaggtggcttgaagatgtctgtgcaggttttggagctgaaagacaggatcccatccacctggcctttgccacacaccaggggccctccagagtcacccttgcagggggcttggctcttgctcccagcctttaagcatagcatgctgtctatgaggacaccgttccagaagcggctgttgttacacatttgggtatccagcacacgcagatccaactcctgcagggccctggcccggggcccaccctggtgggtcattccccagccagctgtgctgcaccaggtaccttctgccggcttggatcggggctttcttggcagagctagtggtttgacattcttgctgggctgcactcgtctatctagcttaagca

SEQ ID NO: 2031 - DNA, 568 bp, Mus musculus
  misc_feature (1)..(568): n is g, c, a or t
ggaccactgatcctgtgccaggatggaggtctgctggtccctgctgctactgctggccctgaaaacactgtgggcagcaggcaacagatttgagacccagatcattgggggtcgagaggcagtcccgcactcccgcccatacatggcctctctacagaaagccaagtcccatgtgtgtgggggagtccttgtgcatcggaagtgggtattgacagctgcccactgcctgtctgagccgctacagaacctgaagctggtgcttggcctgcacaacctccatgatctccaagatcctggcctcaccttctacatccgggaagccattaaacacccctggctacaaccacanatatgagaacgacctggcactgcttaagctagatagacgagtgcagcccagcaagaatgtcaaaccactagctctgccaagaaagccccgatccaagccggcagaaggtacctggtgcagcacagctggctggggaatgacccaccagggtgggccccgggccagggccctgcaggagttggatctgcgtgtgctggatacccaaatgtgtaacaacag

SEQ ID NO: 2032 - DNA, 702 bp, Mus musculus
aaaaaaatatgaggtaattatgttgctttattaactttttctcacaaattctttataaaaatttcatatccctaaaatgtcatccaataaataacaggaatttctatacataaaacacatggacatctgtgctcccggttcttaaagcaacgggagaagattctagtttctgaaccataaatgccaacattgtaaatctttctgagaatttcaggagtgcgggcaatccctgcttttcaggaacaagaacaaaaccctctctcatgacatctgaatatatgaatatatgaatactttagatgcaggtagtatgtaaatatgtttacagaaaacaattttctgagttgggacaaatagcacttttaaggaaaccaattaaaattattatataagtaattcattcattcttgacttcagacaaaagtttttcatgtttatatttgtgtgtttggcggtgtctcgtgctatccaggctggcctcaagttccgaatggagctgggagtgacagtgaacttcctcctggctgaagttgcaccatggaccattagtcttgttcaggagagaaatgtgcgcactgtgcccttgatggtccctctacagatgggacacttcctcagagaggagcgcagtctttgcacacgaccagatggccacagggaatgaacacgatggatacctctcggtccatacacactttacac

SEQ ID NO: 2033 - DNA, 569 bp, Mus musculus
ccatgaacatggttcaagacagcgcctttctagccaagctgatgaagagtgctgacacctttgagttgaagtatgacttttcctgtgagctgtaccgattgtccacgtattcagcttttcccaggggagttcctgtgtcagaaaggagtctggctcgtgctggcttttactacactggtgccaatgacaaggtcaagtgcttctgctgtggcctgatgctagacaactggaaacaaggggacagtcccatggagaagcacagaaagttgtaccccagctgcaactttgtacagactttgaatccagccaacagtctggaagctagtcctcggccttctcttccttccacggcgatgagcaccatgcctttgagctttgcaagttctgagaatactggctatttcagtggctcttactcgagctttccctcagaccctgtgaacttccgagcaaatcaagattgtcctgctttgagcacaagtccctaccactttgcaatgaacacagagaaggccagattactcacctatgaaacatggccattgtcttttctgtcaccagcaaagctg

SEQ ID NO: 2034 - DNA, 739 bp, Mus musculus
gagacaaattcataaagcaaagtcactacaaggggagaagccttgtattttcatttagttttggttttttgagacaggatttctctgtgtagtcctggctgtcctggaactcactttgtagaccaggctggcctcgaactcagaaatcctcctgcctctgcctcccgggtgctgggattaaaggtgtgtaccatcactgccaggcagaacctcatgtttttaaatatggaaagaaaacaactcttgtaggaaggggatgtttcatctcaatcagtcctgtgacattacaatggatataacacaacacaaatggtcaccggaagccatttcttcatgcctctgggtatatcctatgagccactaagatctgggatgtacccagttcagccttcaagacaaaaaaaaacaaaaacaaaaacaaaaaaaaacccagatttcctttgtctacgaagcatacatagtgaattaaaagatgagatattactttgaaaatttacaattacttgaaaataactgtagaaagaatactctgtaagaaaatcaacccaggagctctgtgggccagagtacaagctccccaacacagggctgtctgaccgacccaccggcaggatgagccttcccaatgctctaccatggcacaccgtgtatctgcaacagccacgattactctgttctttggctcacaattctctgaaggattggctggtattaagtgagacattcacaaaattccact

SEQ ID NO: 2035 - DNA, 566 bp, Mus musculus
tggcagggttataattttagagtatgctctagagtatgttgaacagcgtgaagactggcccttactgaagacagaactgttccaagagcagcattcccgttgagatgctttggagtaaagtactgtgtatgacgatgacagacattttagttaagggggtgaaaaaaaaaggaggggtatttaggaaaccctgaggtggaattttggtgaatgtcttcatcttaataccagccaattccttcagagaattgtggagccaaagaacagagtaatcgtggctgttgcagaacacggtgtgccatggtagagcattgggaaggctcatcctgccggtgggtcggtcagacagccctgtgttggggagcttgtactctggcccacagagctcctgggttgattttcttacagagtattctttctacagttattttcaagtaattgtaaattttcaaagtaatatctcatcttttaattcactatgtatgctgtcgtagacaaaggaaatctgggtttttttttgtttttgtttttgtttttttttgtcttgaaggctgaactgggtacat

SEQ ID NO: 2036 - DNA, 838 bp, Mus musculus
cctttttttattttttaagctacaaaaggcattcatatttttggcaagttttgaattcacgctctagacaagtgacatgccctagaaaaatccaaacccacgaactcacagcccccttttcctcagcagtaaccgatacaaggtttttctctagagtggacggcccctcactctaatctctaggaggcagacaagccaaggttcagtaggttgagacaatctggcagcttctcccctataatataaaatgccaaaaacccatcactctatggccccatcttcttatgcaaatagttatttaaaaagaatgtgacctcatttgtagactggaaaagctccaactaaagaacacctaaactttgcgcttttctgtgaagttatgagagccaacaactgggtcaatgtgatcatcctattagctcgagaacatacttgaaatacaaagtcaaaaaaaaggaaaagcagacacgtgaatccatgttttgttttgtttttaaaatgggctaagcattatctcttcactgtggccacacgacactaaggacactaagatgacagacgctatcataaaggaccggtatgagaagtagttaccggcttctttagctacttacctactcttccatagcacccagaagggacagctatctgaatgtctgtcttcacgatggctttctccatgggtgatattgtataatcataggcactgaaaggcaaatcagtattttaaagtgtttttaacattccttcttacgctaatgcatataaaatgcgtgccattacttcatataaacagatcctataaacgaccttatggcagattcctaactcacctaaa

SEQ ID NO: 2037 - DNA, 584 bp, Mus musculus
attaagggcctgaagccatctttctaaagctaaaagaaagtgcctactaccttgtaagtaaacctttttaggtgagttaggaatctgccataaggttgtttataggatctgtttatatgaagtaatggcacgcattttatatgcattagcgtaagaaggaatgttaaaaacactttaaaatactgatttgcctttcagtgcctatgattatacaatatcacccatggagaaagccatcgtgaagacagacattcagatagctgtcccttctgggtgctatggaagagtaggtaagtagctaaagaagccggtaactacttctcataccggtcctttatgatagcgtctgtcatcttagtgtccttagtgtcgtgtggccacagtgaagagataatgcttagcccattttaaaaacaaaacaaaacatggattcacgtgtctgcttttccttttttttgactttgtatttcaagtatgttctcgagctaataggatgatcacattgacccagttgttggctctcataacttcacagaaaagcgcaaagtcttaggtagttctttagttggagcttttccagtcta

SEQ ID NO: 2038 - DNA, 835 bp, Mus musculus
  misc_feature (1)..(834): n is g, c, a or t
atacagggcaatactgtaacttcactgttggttccaaattcaacacagtacaaagcaaggaaacatttatttactacactcacacagtaatgatcaagcatcctcatgtttgcccagatagcttaaaatagcaaatattcagtccccacaagaagaactgtcttcggttttaagccaagtcaaagaatagaagggaaacccattactcgctgagcttggcactcaggcaccattctcggacctggcgcaaacatcagcccacatcagcattgcttctactcggcttcactgctttaccaggtaaggaacacaagctaaggttctaacaccttatccagacaagtttaactaactctaagatcacatgacttgacaagaaatatacaaatgttggttaagaacttaccgttctgtcaatcattttaaagagtccatgaaatatacatagcaatatatttgtaaccagaaactacactaattagacacatcatttagtttgttaagttctacctgaaaacatgccattttaagtaaaatcctaaaaacataactctcaagttctatggtttaacaaccaagtcccactaaaacagcacagatttcctttcacaagcgcggccagcaacaagacaaactgcggtatgtcagacaaacaggtccccaagttcttctgaagaacaccaaggagttgccagagagggtacacagtggccttgatctttatttttctttacctgggattctacaaattctgnaattgatcaatagatttatcttgttaataaacagcaccagtcgtgcccactgatancattcaacctgactttctcagttc

SEQ ID NO: 2039 - DNA, 568 bp, Mus musculus
  misc_feature (1)..(568): n is g, c, a or t
caacagtaactccaaagtgtcagaaaatagttaacattcaaaaacttgttttcacacggaccaaaagatgtgccatataaaatacaaagcctcttgtcatcaacagccgtgaccactttagaatgaaccagttcattgcatgctgacgcgacattgttggtcaagaatccagtttctggcatagcgctatttgtagttacttttgctttcttgagagactgcagatataggattaaacattaacacccgtgagtccagttgacttcacttagctgtagcttactcagcatgactttagatgaggatagcaaacaatcattggagcttaatgaacatttttaaaaaaagtaccaaggcctcccctcttgttgtgtttctttcagggataccattaatttaattgtatgatttgtctgcactcagtttctccccttctcaaatctcagccccgcgttgttctttgttactgtcagaaaacctggtgagttgttttgaacagaactgtttccctcctgtaagatgatgttactgcacaagntcaccgcagtgttttcataataaacttgag

SEQ ID NO: 2040 - DNA, 481 bp, Mus musculus
aaagataaagatgtacatttatttccatgagttacaagtgcatcgcattgctgttcatactagcaggcagtctttatagaacccattttccattgatgtcaaaataaaaaataaaaaccatgaaaacaaaaggacagctgagaaatgaaaagttaacaatataattatcttttctacattatcttctgggtagcattctcttcatggaatacaactcagaggtcacaacagatttcgttcaatcaaaggatgtgacacttggacattggtctctgcacagaaaccttaacagtcatgcaagagcacagtaagtattgaacaaggcatatttctcatcagagagcagtgagggggtctggaggcaccgtactgggatatctccatcaactccacagtacacagtgagtgaacaaaatataggtgagctggatattaagatagctcgaacagttactgctagccttttatgacggatagtcga

SEQ ID NO: 2041 - DNA, 497 bp, Mus musculus
tcataaaaggctagcagtaactgttcgagctctcttttatttccttctctcctatattttgttcctgcactgtgtgctgtggagttgatggtgttatcccagtgcggtgcctccagaccccctcactgctctctgatgagaaatatgccttgttcaatacttactgtgctcttgcatgactgttaaggtttctgtgcagagaccaatgtccaagtgtcacatcctttgattgaacgaaatctgttgtgacctctgagttgtattccatgaagagaatgctacccagaagataatgtagaaaagataattatattgttaacttttcatttctcagctgtccttttgttttcttggtttttattttttattttgacatcaatggaaaatgggttctataaagactgcctgctagtatgaacagcaatgcgatgcacttgtaactcatggaaataaatgtacatctttatctttaaaaaaaaaaaaaaaagggcggccgc

SEQ ID NO: 2042 - DNA, 715 bp, Mus musculus
gaggcaaatatgtgatttattaaggtgagatcttaacacagatttaaggataactattagtagaaaggtatcagattccaaacataatggtgcttggccatgctcttctgctgatatcgtcccaccttcagagctgactctgcttctactgctataaggagctgactgacacttccccaaagaagtttatcaaacaacctaatcatttgaggtcactggtgacaaatctttgaatggcttcattaactataaaaaattgaaacctttcccccaccccctcctttgccactaggaacattgcagcctatggcttattaactataaggcataggatctcacactctaaaccagtggttctcaaccttcctaatggatctcctgaaggactccctttcttttctaagtggccttgtccttgtctttctgacctgtctcatgtacatcgtaagggggttcagcaagctttgtgtttgtctaacactcctcactcattaaatcactgtcttgttagccaagatggaagaggagtgcgatcctttcttcttgttctcaagcttagctgttgcttactattttagttagtgtgctcttctaaggttaattttttattctttaataatttcctgcatttgcataatatactttgagaatattcacccctaagtcccatctcttaccactctcccattcccttcaaaacctatcttcccaacac

SEQ ID NO: 2043 - DNA, 585 bp, Mus musculus
tgaagaagcagtggggattccaaacatacctgtacatcctattggatataatgatgcagagagactattacgcaacttgggaggagctgctccaccagacaaaagctggaagggaagtctaaatgttagttacaatattgggcctggctttacaggaagtgaatattccaggaacattagaatgcatgttaataacattaacaaaatcacaagaatttacaatgtaattggaactatcagagggtctacagaacctgacaggtatgtcattctcggaggtcatcgtgactcctgggtgtttggagggattgaccctaccactgggacagcagttttgcaagagattgcgcgaagttttgggaaacttgtgaatggaggttggagacctaggagaactatcatttttgccagctgggatgcagaggagtttgggctgctggggtcaactgaatgggctgaagagaatgcaaagctcctacaggagagaagcattgcttacatcaactcagattctgctatagaaggtaattacactcttcgagttgattgtactcctcttctaaaccagctggtttacaaagtggc

SEQ ID NO: 2044 - DNA, 787 bp, Mus musculus
acattcagaataccatgctttattggctctatggcaatttgtttacataggcgctcttttcccttttcccctccagaagtgtcaagctggtagatgtgagagaccctaactcccagctctccgtcccttcgacccagtgcaacaacaacgctcgcacccactactatctatggcaaaggccatccgtactggcgcggactggccgtgccaggaaaaagggtttatggggtcatcttccaccacttgaatgcaaatggcaccctgtttatgatggcactggcacagacgtcccctatgttggccaggtagcagtcaaaatcatcaatgaaggtgcacttgagacccaggggctccagtaatccacacactttctcttctaggcagcaggtgccattgattttgggcccaaagggcttggggattccaaggttcttgcccaacacgattatctgcagcatgtcggggaagtacggcctcgcgaagagtttggtgctctgctggttggaggggacattcgtcagctgctccaggcagaagagctgcgggatcaggatgatgtccttgtcctccaatcccagttctgtcttcaggagggtgcggttcaggctgatacacttctcaacataggtgttctgctctcgaaaactcttgtcagccaggatttgggaaatagttttgctctccctcccattagaaaggagctgttctgctccaatgtcttcaaacagggtcacgttcccatagccttccttctgcttctgttcgaacagctcaaagcaggcactgg

SEQ ID NO: 2045 - DNA, 578 bp, Mus musculus
aagcctgtctatctcctgcctacctttgagaaccgtaggaaagaggctttctacgtagaagccacggaattcccatcccccagcttctcgggcctgatctccttgtcactctccctagtagaaaaggctcacgacgagtgcatcccagagattccgctctataaggatacagtgatgttccgggtggcaccttatatcttcatgcccagcacccagatgcctctagaggtttacctgtgcagggagctacagctgcaaggctttgtggactcagtgaccaagctgagcgagaagagcaaagtgcaggtggtaaaggtctatgaggaccccaaccgccagaacaagtggctccaggacgagatggctttctgctatactcaggctcctcacaagacggtgtcattgatccttgacaccccaagggtttccaagctggaagacttccccatgaaatacacactgacccctggctctggctacctgatccgacaaactgaggaccaccgggtggctagcctggattccatcgggaacctgatggtatctccgcctgtcaaggctcagggcaaagactaccc

SEQ ID NO: 2046 - DNA, 700 bp, Mus musculus
gaccatataaagaacatttattctctaaattaaagacataaatacaacatttcccttccctgggctctgcctatatctatgacaaagttcttcaggatcctccaagatccatcttggatttacatacactgttagtggaagaaccatatcttggcttctctggtataagcctggcagagctttgcattcacagctcattgtggtatggctggggttgtttcttggcaagggactgtgtccagaaagtcacttcctcttccttcagtctctgggcttgctgggtggtgccaccaatatgaagatatccttctttctgatcatactttggccaatgaggcagccctttgccattagggttcccattccgagcaaagttggcccagaatttcatcaccatcttgctgagattgatctcctcttcggaggcaccctctcttaaaattggagcaccgaagacagagtagacatcatctgcatggtctcctactacattcttgggtctttggggtgatgagaagcttgggtagtattgatactcatacatgtaggtgggagctccagtgtctctgtggccacgggacacaatcaccgatggaacaccaaatgccacatcccccattgcgtcgagaactccctctctgatctgatcagggtcatcactaccttttgtgtacttctcaacagcaactggaataatatg

SEQ ID NO: 2047 - DNA, 540 bp, Mus musculus
caagatgcagctagaggacaggcggtcaatgacctcataaccaatagaaaggagaaaatccatcttgaattttctgaagattgcctgtacctaaatatttacactcctgcggacttttcaaagaacagtaggctaccggtgatggtgtggatccatggaggtggactgaagctgggtggggcatcaagctttgatggacgggctctctctgcatacgaaaatgtggtggtggtggccattcaatatcgcctgagtatctggggattcttcagcacaggggatgaacacagtcggggaaactggggtcatttggaccaagtggctgctctgcattgggtccaggacaacattgccaactttggcggggacccaggctctgtgaccatctttggagagtcagcaggaggttacagtgtctcaattcttatattgtccccattgtccaagaacctcttccacagggccatttctgagagtggtgtggccttcattcctggaatgtttaccaaagatgtgaggccaattactgagcaaattgct

SEQ ID NO: 2048 - DNA, 790 bp, Mus musculus
atatcagacattctttatataaacagtccattctcagcagcagaatcagatgcagagcaaatgctttcaaaggtatgtgtgcctatgtggtgattacattctccacacattaaaagaaaagggacactaggagagaccacagtataataaagaattacagcacattaatacccgtagccatccaccaaggtcttgctcatattggcaattgaaacttcacatccacatgggcttctttggctaaggtcactatttcagagagctttacaaccattttagcagcttcatccaaatcatcacaagcaaggattttaagaccactgtctgctattagtgccttagcatcatcaactcgtgtaccttgtaaccgcaccacaacaggtattctgatttctaaatcctttactgccatgactattccttgtgcaataacatcacatctcatgattcctccaaaaatgttgaccagaatagcctgcacctttttatctgaagtgatgagtttaaacgcttctgttacttgctggactgtggcgcctccaccaacatcaagaaagttggctggagtccctccgtgtagttttattatatccattgtggccatagccaagccagcaccatttactagacatcctatgctcccatcgaggccgatgtagttaatatctgcattagctgcttctttgtccctttcgtcttcctgactccagtcctgaagatcaaagatcttcttctggcggtaggctgaatttgaatcaaaattgatctttgcatccatgcacaacacctt

SEQ ID NO: 2049 - DNA, 577 bp, Mus musculus
gcagaggaaaaggaacatttacaagtggcctcaaaggaggagtgaagattgttttctctccagaagaagcaaaagctgtttcctcacagatgattgggcaaaaattgattaccaagcaaactggagaaaagggcagaatatgcaatcaagttttggtctgtgagcgcaaatatcccaggagagaatactactttgcaataacaatggagaggtcatttcaaggtcctgtactgataggaagtgcacaaggtggtgttaacattgaagatgtggctgccgagaaccctgaagccattgtaaaggagcctattgatatagtggagggcatcaaaaaggaacaagccgtgacacttgcacagaagatgggatttccttctaacattgtggactctgcagcagaaaacatgatcaagctttataatctttttctgaagtatgatgcaactatggtagaaataaacccaatggtagaagattctgacggaaaggtgttgtgcatggatgcaaagatcaattttgattcaaattcagcctaccgccagaagaagatctttgatcttcaggactggagtcagga

SEQ ID NO: 2050 - DNA, 403 bp, Mus musculus
gttttcaacacctagtattttattcagatagcagtcctgttacacatggtccaagaacattcaaataagaactcaaatcagaagttaaagattggtcttcaaacatcatagccaacaatgccacgtttgcctatgatctctccgatataaaaccacatccacacctcagtggccaccaaaccattcagcacagcttccttaactgtaaggtgtttgaagctaccagttttagcactttgaatgatttttttcacactctgaatagctgtagggatttcagcaggggttgggggaacagctcaaccttggcgtagtgccaaaatgtggccaatcgaggcttcgagtaagtcacggcagcggctaccatcgacggtgccttctccgcgaagttacggatagtcga

SEQ ID NO: 2051 - DNA, 415 bp, Mus musculus
taacttcgcggagaaggcaccgtcgatggtagccgctgccgtgacttactcgaagcctcgattggccacattttggcactacgccaaggttgagctggttcccccaacccctgctgaaatccctacagctattcagagtgtgaaaaaaatcattcaaagtgctaaaactggtagcttcaaacaccttacagttaaggaagctgtgctgaatggtttggtggccactgaggtgtggatgtggttttatatcggagagatcataggcaaacgtggcattgttggctatgatgtttgaagaccaatctttaacttctgatttgagttcttatttgaatgttcttggaccatgtgtaacaggactgctatctgaataaaatactaggtgttgaaaacaaaaaaaaaaagggcggccgca

SEQ ID NO: 2052 - DNA, 694 bp, Mus musculus
aagaacatcagctcctttattatcatcattattattcaccgttattttccctctaaacaacagcacaattcacacaacaaagacacacacatcctccccacccctcaaacacacacacaatgccactagcctgcgtgcaggctgtctggcctttgcttggttccttgcggagtgctccaagacagctctctgtaaaaatgtgacttggacacgggggacacaataaagggggaccttagccagagaattaactgaggggctcccagagttcttggtggtgatggtttgagagccatggggtcatgctgcaaaaaaaggcactgtgttgtgtggtgaaggataaatcccatatggggatataagacctgcccataacctcttctagacaaagagtttagaaacacactgaggtgagccaatgagtcccatcaaccaagccacgtagaaggagggtccagagcagggatctgggtgatgggaaggtccccagagaaaagcaactcttgcattaactgcaaggtaaaaatttaacatgaaatcttcagtccccatttgcttgttttgcaactgtagactgcgagacgtcttcacccagataagatgaagaaaaacctcccaatcctttgacctaacgcaaccaagcaaggctgacccattgcgtcaccctgtggagaaatctattacggatagtcga

SEQ ID NO: 2053 - DNA, 583 bp, Mus musculus
taatagatttctccacagggtgacgcaatgggtcagccttgcttggttgcgttaggtcaaaggattgggaggtttttcttcatcttatctgggtgaagacgtctcgcagtctacagttgcaaaacaagcatatggggactgaagatttcatgttaaatttttaccttgcagttaatgcaagagttgcttttctctggggaccttcccatcacccagatccctgctctggaccctccttctacgtggcttggttgatgggactcattggctcacctcagtgtgtttctaaactctttgtctagaagaggttatgggcaggtcttatatccccatatgggatttatccttcaccacacaacacagtgcctttttttgcagcatgaccccatggctctcaaaccatcaccaccaagaactctgggagcccctcagttaattctctggctaaggtccccctttattgtgtcccccgtgtccaagtcacatttttacagagagctgtcttggagcagctccgcaaggaaccaagcaaaggccagacagcctgcacgcaggctagtggcattgtgtgtgtgtttgaggg

SEQ ID NO: 2054 - DNA, 707 bp, Mus musculus
ccaaagctggcaccgtggtttattggtacgctgtgagggtaaaggtcacctttgacgctccttttcctgacacatgccagagtagacaggtgtgggcagaccacagtgaacagaaccaggtgtgggtagatgctggcacaagaccttagggttgtggtccacaagtgtgcatcctgtcggaagagaaggccggagatgggggccgggggtggggggtgacggtctgtgatacattccttagggagtttgtgcttttccttcctctaagtgggttcctctgcttagtgagcccttattctctccccggggaagagaagagaggaccctaaatgagaagggctgcataaagctgtctgtctgaaacaacctgagcaatatgatgtgtgtgtgtgtgtgtgtgtgtgtgtgtgtgtgtgtgtgtgtgtgtgtgtgtgtgtcttgggtatccagtatcaaaactcccattgccagagtcctggaaggtgtcaaggcctcaggtgtcctctggtgacgacacctcacaggttagtggtaaagagacagggtgatcctaggtctaatcactagatttagagggatatggcatctttccctcagcctgaattgcatccccttgggagacatgactggagagtgtggcactctaagcccgatggaagtctccccgctgccctccagtcttactaatgagcttcacctctgtcacc

SEQ ID NO: 2055 - DNA, 575 bp, Mus musculus
  misc_feature (1)..(575): n is g, c, a or t
tggagttagacagcacacgccacgctgtgttgatccaggcatcctgccgggcccggggtcccaccggggtagagatggaggcgctgacctcggctgccatggctgccctgacggtgtatgacatgtgcattgcagtcagcagggacattgtggtgacagaggtgaagctcattagtaagactggagggcagcggggagacttccatcgggcttagagtgccacactctccagtcatgtctcccaaggggatgcaattcaggctgaggaaaagatgccatatccctctaaatctagtgattagacctaggatcaccctgtctctttaccactaacctgtgaggtgtcgtcaccagaggacacctgaggccttgacaccttccaggactctggcaatgggagttttgatactggatacccaagacacacacacacacacacacacacacacacacacacacacacacacacacacacacatcatattgctcaggttgtttcagacagacagctttatgcagcccttctcatttagggtcctctcttctcttccccggngagagaataagggctcact

SEQ ID NO: 2056 - DNA, 784 bp, Mus musculus
atttaaaatttttttttattttttaaatatcatttattttactttacttggatgtgtgcttgagtgtgtgtatgtgaaccatgtatgtgcagaagcccgtggaggtcagatgagagcattggaccccctggaactagagttataggtagttgtgagccaccacctgggtgctgagaactgaaccccggtactctgcaatagcagattgtgcaccaccgggccctatctctccagaccctaacaaatgtatttatgtgtatgggtttgtacacatgtgtgcagtgccctcaggggccagaacggggtactggagcctctggatctgggattacagacagttgcaggtgttgagaactgcacttgggtcctctccaagagcagggagcatttttaattgctgagccgtctctgcagctcctgggggtctttctaatggaagccgaggggtaaatttgcctgtatctggatgggagcctttggaaagcatgctgggaaattcctcctctggagcagcagctagctggaaagggagcactgaggctggaacgtggccagcatccttggacactggggccagcatccatgaggagagataggctgcttctcaggctctcgggaggcctggatctggctgtgtagctgctggagggacaaatgtccagaacaggaaggtcaatgtccaaaataggaagagcaatgagcccaagaactggccagagaattgaggaccaggtgagagaacagaaatagcattgacaggcaggagcatcttcatataccgaac

SEQ ID NO: 2057 - DNA, 545 bp, Mus musculus
gaatttcggctgctcatggccagcacctccgcctgctaccagctcttccgagaaaagcagaaggcaggccacggggaggccgttatgttcaagggcctgggaggcatgagcagcaagcgcatcaccatctacaagatcctgtccaatgagagcctcacgcaggagaaccagtacttccagcgctgtctggactggaaccgcgacatccttaagagggagctagcgctgactgagaaggacattattgacctgcccgcgctcttcaagatggatgaaaatcaccaggccagggctttcttccctaacatggtgaacatgatcgtgctagacaaggacctgggcatccccaagcctttcgggccccaggtggaggaggagtgctgcctggagacgcacgttcgaggcctgctggagcccctgggcctcgcctgcacgttcatcgatgacatctccgcctaccacaagttcctgggagaggttcactgtggcaccaatgtccgcaggaagccgttcaccttcaagtggtggcacatggtgccctgact

SEQ ID NO: 2058 - DNA, 803 bp, Mus musculus
ctttagtgtccttgtttttcatcttagatttgttccgtgggctggtcatcctgttcatgaggaagctgaaaattcggctcactttgtacttttcagactcggatttggcaggaatgacgtattcatcccattcttcttcctgaatccttttttctcctggtggctcctggaaactatatgatctctgttcttcgctggtactgcacactgtgaagtcgcgcactagccgggattttcctgaagagattttgggtgatgagcaggagtaggagcgagaccggatcccagaaagcaaggactcctttgaatgcagagtactggacagagagagtgattcggtcctggagatattacagtctggttcagtgttggtctcaaaagagtccagttcatccccgctggggagtccagttcttggggaactctgagagcccacagcatagcagatggggggctcagaacctccttccccctcactgtcggtaaccagggcatccaggctagaactccttttcttgagatgactctgctccttttcaaatccatggagaccaaaagaaaggttcaagttggaagtgcgagaactggatggtgtcacgaaagactgcgaactgcagcatccagggtcccctcactgttctcaatgagtgggccccgcaggactggtgtcgggaggaagggtgtgcatgcaagcctgaggccccagcatggacctcccagactcgggactcgtatgggtggagagtcctctaggtttatatagttgatatcaaatcgcaacctggtcaatcacatacagtagc

SEQ ID NO: 2059 - DNA, 552 bp, Mus musculus
  misc_feature (1)..(552): n is g, c, a or t
gggggaggctccgggctgggcacggtctgcaggcactcctctgcctcagctgatcctttcacccaaacaaacaatggattctgactcggactcacctttcaactactcctggccttccttccccaagatgaagattcggcgcagggcatccaagaaagatcgctcctttgatggcctcaaaaaatccaagcatgtcccagcgtcccttgctgcaggccagctctctgatgttctgaacgggggtgatgaagtctacgctaactgtatggtgattgaccaggttggcgatttggatatcaactatataaacctagagggactctccacccatacgagtccncgagtctgggaggtccatgctggggcctcaggcttgcatgcacacccttcctcccgacaccagtccctgcgggcgcccactcattgagaacagtgaggggaccctggatgctgcagtttcgcagtctttcgtgacaccatccagttctcgcacttccaacttgaacctttcttttggtctccatggatttgaaaaggagcagagtcatctca

SEQ ID NO: 2060 - DNA, 668 bp, Mus musculus
gataacatgggtggatttatttttataagattcaagtgcaaacttaaaaataagaacaaagaaagcttttcaagagtcaacacaaaaatctaaggaacaatcctacaatcgtgcattttaacagaaaatacaaatatgaatataaaatgtataactacattcaaaattaaaatgtatctctccagttcccaaacgccacacaatcttttaacctgttctcagcttctcactgtagaaacatttgtcatatgctaccaggaaaatatagccaaagatatagtcagtctctatgaataaagaaacaggattctccctcgctttggactctatgaatctttcatctgtatttcatttctaaaaaatcagacaatcataccttcagtctacttaaaaaaaaatgagtacaaatatcaaggaaataaaaccctttcgtgtaattaaagcaaaaatcatgagtgttcaacttagaaatgcacacacttataatcaatagtaagcacagctttatttgatggctaacatgtaataattgtgaacaatttaaatagttataaaaatggagatcaaaatctttaggctcaaatacttaaaaagtcactatgaatatggaaaatagttctgtttacataaacgtgtctatttttgatgaaaattcaggggggcagtgg

SEQ ID NO: 2061 - DNA, 561 bp, Mus musculus
aaacacgttaagggaccagggagatgccactgcccccctgaattttcatcaaaaatagacacgtttatgtaaacagaactattttccatattcatagtgactttttaagtatttgagcctaaagattttgatctccatttttataactatttaaattgttcacaattattacatgttagccatcaaataaagctgtgcttactattgattataagtgtgtgcatttctaagttgaacactcatgatttttgctttaattacacgaaagggttttatttccttgatatttgtactcatttttttttaagtagactgaaggtatgattgtctgattttttagaaatgaaatacagatgaaagattcatagagtccaaagcgagggagaatcctgtttctttattcatagagactgactatatctttggctatattttcctggtagcatatgacaaatgtttctacagtgagaagctgagaacaggttaaaagattgtgtggcgtttgggaactggagagatacattttaattttgaatgtagttatacattttatattcatat

SEQ ID NO: 2062 - DNA, 654 bp, Mus musculus
catgctgacaggtggttttctacttttatttggggatacaaaaggcacctctccctgtacctgaggaccaatcaacaggtgagccccaggtgggtggagccctgctggaggtacagagcaaggataggggaaaggcagtggaggaactggggagctctgggtacccagaatcctcgaggtctcatcttgacacctgggcagtgagatgtttcctcgatgggtgcagtttcgtaccaggacagtgggcagctcagcaggggccaccatagcccatcccaaaagccactgaagcttttttcgggccccactctgcagggggatgggataggcaaggctgtggtaatgtctcctctattgcctagactgttagtgtagagtctggagggctcccgtgggattctctggggaagggaccaggggaatatcacagaagcagccttacaccaggtcaattaggtcctatcaggtcagcttgtctggggccccaggtctcagtaaaatcatagtcgttagcaggatgggaagaaggcaggaccagccaggattccagtggagggctgacttattccttcagttgacccccttgctgcccaggctctgggagaagagaagcggggtaacaaaacacccccaagcagctttaataccaaggga

SEQ ID NO: 2063 - DNA, 554 bp, Mus musculus
cggtagccgcggcaatggactttctcctgggaaatccgttcagctctccggtgggacaacggatcgagaaagctacagatggctccctgcagagcgaggactgggccctcaacatggaaatctgtgacatcatcaacgagacggaggaaggccccaaagatgccttccgagcagtgaagaagcgaattatggggaataagaatttccatgaggtcatgctggcccttacggtcttggaaacatgtgttaagaactgtgggcaccgcttccatgtactggtggccaaccaggactttgtagagaatgtgctggtgaggaccatcctgccgaagaacaatccacccaccattgtgcatgacaaggtgttgaacctcatccagtcctgggctgacgcgttccgcagctcacctgatttgacaggtgttgttgctgtctacgaggacctgcgaaggaagggcctagaatttcccatgactgacctggacatgctgtcgcccatccacacaccccagagaactgtattcaactcagagacaccatccagacagaactct

SEQ ID NO: 2064 - DNA, 883 bp, Mus musculus
  misc_feature (1)..(883): n is g, c, a or t
aaaaaaaacatagccaagtggtttctggggctggagttcacagctgagttttgtttgacaggagcacctttctgtttgtctgtggacattgccagccatggaggaagctgctgagaagctgtgcagatagcgctcagcctgcccagtatcagggccaaggtgcaacattttctagagtggaggatggccaaggaagggaaaggctttcctttccctcgagaaggatccctctcctctaggatgacccgttgtccatccagacttgagataggggcaccaagatccaggggctccttctccccgctcagtctcaccagcaggctacccaggtccaggccatatttggccaccacgggccgcaacacttccgtgactggcttggtgggcttggccttgagtcccactgaccggttaatcggaacgagatccagccgaaacaaagtccgcttttccaagcgtaggtccctggtggccaggatgctgctgtcctgatgcagcacaagaggcttgtctccgcccaccaggaagaggtccacagcagccccattgatgccatgccgttcacacaatccagacagaatctctttgatggagaacccggacttgacagcaaccacacaggatgtcccgtctgggacgtggacacagcaatgtttggcagccttatctttctcgagtgctgaggtcctacaggcctctgacaggtctaggctccacgcagaagatacagagccttgggactcccgacggcagaggcctccattggcatgaggggcatcatgggcatggtcacatggtccttcttcttctgggaccgcccgtgctcctgctccttgaccaagagaaaagngccctctgcgttttttctcactatcctcctccc

SEQ ID NO: 2065 - DNA, 573 bp, Mus musculus
aacatccctccatggcctctgcatcagctcctgctccctgccctgcttgagttccagtcctgacttccttgatgaacagcagtgtggaagttctgcaactgtgtctgatggtgagttgactggagctgaccttaaggactgcatcagcaacaacagcctgagcagcaatgccagcctccccagtgtgcagagctgccggcgcctacgagagaggagagttgcaagctgggcagtgtcatttgagcgtctccttcaggatcctgttggtgttcgctacttctctgattttctacgtaaggaattcagtgaagagaacattttattctggcaggcctgtgagtgcttcagtcatgttcctgcacatgacaaaaaagagctctcttacagggcccgggagattttcagtaaattcctgtgcagcaaagccaccactcctgtcaacattgacagccaggcccagctggcagatgacattctcaatgcaccccaccctgacatgttcaaggaacaacagctccagattttcaacctgatgaagtttgatagctacactcgctttctgaaatcccagct

SEQ ID NO: 2066 - DNA, 859 bp, Mus musculus
gttgttgttttaacaaaagtttattatgacgtacgaaggacttcaggacaacggttctttctaaccattcagagcttggtgagagatggtacagcagagaaccagggacttacaaaggagcagaaagaagcagtgccattctcttggtcccactatgctgttgtgccttggttttgctgaatttcttaatttcacctgttggccgggcacttttttctcacgacttttgcttctggctccttgagcttctgctcctgtgtgtatcttctttgtctgcctccttggttcttggttggctcgtgccgcctttgaggctgggcatggcactgctgtcccctgtcccagttattattaaccccttcctggactgttctgatgcgccgttagagaacggccacagtgcaggtcctcacattcgtttcccacaagttgtaccacaagcacaccgtagagcagcggcaaggcaattgcctcctgggttccccaacaatggctaaggcataaagatgtctgataaaccttcaaggttctgagacccaaggaacctggtccttgcctaggtcactcctaaggaacagaagttttgggtttttttttttcctttcatgttaacaaaacactgtgcaaaagaaatgatgccctcttattcataaaataataaaatagctaagttctcttcaagctctcagctctactgagtactataaggagtaattcccaagtgctcagaaaccattcaaacctccaggagtgattctctcaagcgctgggggaggtagagacggcatgggctagagcagcagagcttcacatcttcatgagagtgtcaggattactttgtaggtgggggattgatcat

SEQ ID NO: 2067 - DNA, 559 bp, Mus musculus
ttttgatgcggatggactcttgggatggactcttgataccttctgaggactaggagctatgtttctgttttgttcctcctaactccaacatcaagatgttgcttccgacagtggggatcggggtcttctaagctggtttacatgaactttggaataagaggtaaaagcctaacatggttttgaaggtgcaccaaagagtcagaacagacactggccataatctttctaggatcctgaggctacctaccatgctgggagacgcaggggtcttgagggctggtcaggacatttgcgaggtccttagagggtctggggcagtggtgtctttcaggttggaacgactttaatgttttgataattggctaagttggtgcaaagcagcatcgggcctttgtggggagttcagacatgaatggaattctgttcttcctcctccattgctaccctgggtcctgtcaaacccagagccctgcccgtggtaggcaaccacggtggccctgagtcatacctgggcccttcagttctctcttccagttacctcaggtgtactcccttcgct

SEQ ID NO: 2068 - DNA, 741 bp, Mus musculus
cttcagggctccactttattggggagcagctttgggtgggcgggatctagggctcctgggcttgcagtagggcccgcacctgcctgatctgccattcgacactggatttcgctgtgccacccaaggcactgtactgttccacgctgtgactgtagtcccacacgtgactcacatcacctgagaacaggggactgatggtctgcagctcctgtagcgacggcaggttgagagccactcctttagtctctgccatgaacacagctttccctgaggcctcgtgggcctggcggaatggcatccctttgcggaccaggtagtaggcgaggtccgtggccagcatgtcagggctgagcgcctgtttcatgttctcacgatgaatctgcaatgtagagatgactccagtggccacttggaggacagctatcatggtgtcagacacttcaaacacagcctccttgtcttcctgtaagtccttgttgtaggtgcttggaagtcccttgagggtcatcaggagtccggcacaccgtccaaacactcggcccgccttgctccggatcagctccaggctgtctgggtttttcttctggggcatcaagctgcttccggtgctgtaggcatctgagagttgcacaaagctgaattccttggtaccatagagaattaggtcctctgccatcctgctgaggtgggtcatacacagagaagccaaaacaggaactcagccacaaagtctctctcact

SEQ ID NO: 2069 - DNA, 581 bp, Mus musculus
gaggcggaacgtgatgtcctcttcccagggtacacacacttgcagagagctcagcccattcgctggagccactggatcctgagccacgctgttgcgctgacacgagattcagagagactcttggaggtgcagaagcggatcaatgtcttgccactggggagtggggccattgcaggcaaccctctgggtgtggaccgggagctactccgtgcagaactgaactttggggccatcactctcaacagcatggatgccaccagtgagagagactttgtggctgagttcctgttttgggcttctctgtgtatgacccacctcagcaggatggcagaggacctaattctctatggtaccaaggaattcagctttgtgcaactctcagatgcctacagcaccggaagcagcttgatgccccagaagaaaaacccagacagcctggagctgatccggagcaaggcgggccgagtgtttggacggtgtgccggactcctgatgaccctcaagggacttccaagcacctacaacaaggacttacaggaagacaaggaggctgtgtttgaagtgtctgacaccatgatagc

SEQ ID NO: 2070 - DNA, 883 bp, Mus musculus
aagcggaaaaaacatttatttctatcaaattcaatacaaatcaatcttcaagcaaggtaacaaaacaaaacaaaaatcaatgaatacaatgaatagttaggatagcagatacagaacagactctgaactaagcacatatacccaaatcaagaggaacaccaactgtcactgaagaaaagctgacgtgccagctccagggaaacttaagccaacactgagttaaagactggcttgaacttgggggatcacagtgaaatgccatcctagctcaacgtcgtcccccagagatcggtccagctcaaaaaaacaaaattcgcaaattcagtagtacaagttctcataagactagagaagccttgagctctaccatttcttgcagtccacacagagcctggggttttcaatttttcttcccttttcccaaatcccagagagaaggtgcggtactccctgcaaaggttttaaacaggagccttttattaaaagacactgtgcttcctgtctgtcactagagggagtcaggatggagtcctgggcaatggcttcctgtctccctcacacccaaccacataaagaacagtcaaaccaaggagtgccctgaggcagttgatggcatttgttctggcaagaattgtgcagtttgccacaccaaaaataagggtaaccgttatggttaattttaatgtttcagtagatgtcagctttcatatggcttcctgacgcctagaattgaggcagattgacctggtctaaacccagcctgccttaacgtcttgtgtctgggactccttttgcttaggcaagagcataaaaagaatagctcacgcgccactctcctgaggcacagcagactaagcagctcatggcccaggtgctaggtcag

SEQ ID NO: 2071 - DNA, 537 bp, Mus musculus
tggaggggcaggtcgggagtgggaaaccctgagattattcccaggaaccaagggaagtagggagttaaagggattcagggtaattcaagagaggtaggaaaacttcaaacttttcttcccctcttgtggagtctggggagaacaatagggtgtgagcagctccttgcctgcacactgctgtttctctatgcagttcaagctcagtagactacggtagccccagtgggacaccaggctcagaagagcagcaaggggcaaagacatcttttccaaagtcttgggtgatttcatgtctatgggtgtaaagagtgttttctgcagcaggcttggctgattttgtggaaatggtcataaatactgaccgtgtcttgacaaaggtgcaatggaagcagcatctttgccttctcaggcgacacatggccaagagtctgggtgctctctgaggttctgactttacattcatggactccccgctcagcttgcatcccacaggcctcatgggaaaggctgcatgtttattcctccagtatttatgac

SEQ ID NO: 2072 - DNA, 789 bp, Mus musculus
ccttcaagtttttgtttggttggttggttttattggcaagcatcagtgccgcattaccgtcgattccccaggcttcatcgtgctgcggtgagaccactggaaagcacggtgttctcagcacaaggctgggactgctccttcaccaccgggtagaaatatgggtgctccatggcctctttggcggtcaatctctgttgatggtcgtaccgcaggagcttgtcaagaagatctagggcctccgggctgacaaggtgcctgttctcactatggataaagttttcccagcgcttccgtgaatgttgtcccaggatatcattgaagtgtggatctaggtctatgtggtacttcttcagataaccatatagttcatctgtccccagaaccttggcaattcgaacaagctggtcatagttgtcctgcccgtggaagaatggctcctttcggaatatcatgctcgctaacatgcagcccaagctccacatgtccaagctataatcatacatctgatagtccacaaggagctctggtcccttgaagtacctcgaggccactcgaacattgtactcctgagcaggatgatagaactctgccagaccccaatcaatcagtcggagctttttttgttggtgatctatcatgacattgtgaggtttcacatccctgtgcatgattcccttgctgtggcagtaatccagagctttaagtagttcatacatataaaaccggatatcaaagtcagtcaggatctggtagagttgcttaaaatctgtattattgatatattcaaat

SEQ ID NO: 2073 - DNA, 567 bp, Mus musculus
aagaaggtaaaacgagaggttaagattctggagaaccttcgtggtggaacaaatatcattaagctgattgacactgtaaaggaccctgtgtcaaagacaccagctttggtatttgaatatatcaataatacagattttaagcaactctaccagatcctgactgactttgatatccggttttatatgtatgaactacttaaagctctggattactgccacagcaagggaatcatgcacagggatgtgaaacctcacaatgtcatgatagatcaccaacaaaaaaagctccgactgattgattggggtctggcagagttctatcatcctgctcaggagtacaatggttcgaaggggcctcgaggtactttcaagggaccagagctccttgtggactatcagatgtatgattatagcttggacatgtggagcttgggctgcatgttagcgagcatgatattccgaaaggagccattcttccacgggcaggacaactatgaccagcttgttcgaattgccaaggttctggggacagatgaactatatggttatctgaagaagtaccacata

SEQ ID NO: 2074 - DNA, 696 bp, Mus musculus
aaataaaggatggcataggacagtgaaatccccatagtgtttattgaaatgttctattaaatggcactgctttgtctaaatttcctctaaaaaaaatatgttagcatgtcataaaagtccctcacatttgagagaaaattctaaatcaagagatcttttaaaaataatacaaatgatctcacggttttgtttaaaaaaaaaacatgattcttttttaaaagcattatacaagaattactgggtagatcatcagtcatctctatgatttaaaagaaataattcataattctaaccgaaagttggtctgggcctctttttcctagctctccctctatatatgtatatatatatattcatataaacctaaccttgggctccattttttggatactttccccacatattttattagcttgtcctaatcctcttcagtatctaacagatacttttacaaaagtaatacaaaacacacagttctcaacactaactggtcggtgggaggagaaaagcagtgtccacttaggataacagagattaaaaacaagaataacatctgaaggcagagtttaacattctagaaatttacaaaagacgacaggtctctggatgaaatttggttatttcagaaggcacctcaaggctaaaggctttgcactcctttcagcaatcaaaaaataactcactcttattgctttc

SEQ ID NO: 2075 - DNA, 497 bp, Mus musculus
gacagatcaggttaaatgaattattaaaggagcattcaagcacagctaacattattgtcatgagtcttccagtcgcacggaaaggcgctgtgtccagtgctctgcatatggcttggttagaagctctctcgaaggacctgccaccagtcctcctggttcgtgggaatcatcagagcgtccttaccttctactcataactgttctgcaccatggacttcctctaaggatggcacttcagtgcccagtcaaagtgactgtatcgtcaggaacaccacagcatcgcagtggcagacggggactgcttcactacttcattattggaaagcacatggaaagttgccccactgatagatagatggagacttcagttgtagtctactccagatctcaatcttaatgactgctaattctttcttgttggactgaagttcatgagagtaaaattttcctttgctacttgaaagcaataagagtgagttattttttgattgctgaaa

SEQ ID NO: 2076 - DNA, 628 bp, Mus musculus
gtgggttgtgatatttttggcgttttattaaaaatggaaaaagttatttttgttagcactcatggtgcccctcccctcccccaggcagacccccaaactgtcaaggtaaggcaagcccccggaggatgagtgggggctaaagttggggctgctatggctaccaaaggatgagctggtgatgtgagctgggggtgcctgttacatgacactctccaccacgacgaccttgctgctctcggacacgggagtcagggtggtcaggcccctgacatctgcatcctgagctctgtattccaagtgatggaggccccagataggctgggtcaggtgctgccatcgctctgccatggttccttttgccctgaggagacagcccaggaggtggaggggtacacatagcatagaagagagtgcaaaggcccagcccatagcttcaccccaccatgggtacacgtaggtgttcgttgtagaccagtggctcgtagtacacaatgttgaagatgaagatgcccatgcagaccaatggggtgaagaaggacagcaccatttcatccaggggcaaggtcggtacccaatcatacaggcaatttcatccatgaagcggtcactccataaacccaagcacaac

SEQ ID NO: 2077 - DNA, 424 bp, Mus musculus
tccgttgctctctgctgcgccctctgctttgtcatcgatctctccatggtgactgatggtggaatgtacgtcttccagctatttgactactactcagctagtggcactaccctgctttggcaagccttttgggagtgtgtagttgtggcttgggtttatggagctgaccgcttcatggatgacattgcctgtatgattgggtaccgaccttgcccctggatgaaatggtgctggtccttcttcaccccattggtctgcatgggcatcttcatcttcaacattgtgtactacgagccactggtctacaacaacacctacgtgtacccatggtggggtgaagctatgggctgggcctttgcactctcttctatgctatgtgtacccctccacctcctgggctgtctcctcagggcaaaaggaacca

SEQ ID NO: 2078 - DNA, 571 bp, Mus musculus
  misc_feature (1)..(571): n is g, c, a or t
gtgaataaagcagacatttattttcatgattataacacttgaaatactgcaggaacttcaggtgagggggttcctgcctgtcatctcagcatttgggaagtagaggcaggaggaacagacagacctactcctcagctgtgccttccaggacgtgcttaaaggagaagggggagaacttggagccagccccctcatagaacttgttctggaattccacccaatgcagccggagggcgggcagaaaggctgagagaccctccatgacaaggaggatggccacggtgaggacggcgaaacgcaaaaatgatgaagacaccaacgagccctgcccagccttgaagggnaggcgttcgctcatgaccatggtccagagcacctcggacagctcagcgtgacgcaagctgangggcccagagccgaaggtacgaggctgtatttagagatgcagcctaggcagtactcaatggtgtgaatggcttggtggacaaagatgtctccaaagttgaactcctcctcatggccgtccttcatcccatgggcactgcagtcttcttagaagagtggcccgagt

SEQ ID NO: 2079 - DNA, 598 bp, Mus musculus
agcagtgcatcattgccgagatctggttcccagtagcagacactagacacattaagaaggccctggagcaaggcatggaactcagtggctcctccatgattcccatcatgacagaagtggaaactaaaacagaccctcccaccttcaacaggacgaataaatttacagctggcttccagaacattgttgatgcgtatggtgtaggtagctaccgagagataaacccagctccctacactatcatcaccttccccttcctgttcgctgtgatgtttggagactgtggtcatggaatggtgatgctgatggcagccttgtggatggtcctaaatgagaggcacttgctggctcagaagagcaccaacgagatgtggaacatcttcttcaatgggcgctatttgatcctgctcatgggtatcttctccatctacaccggcttgatctacaacgactgtttctccaaatcttttaacatctttggctcctgttggagtgtccagcctatgttcagaaacggcacgtggaatactcacatcgtggaaaacagtccatatttgcagctggacccagccatcccaggagtgtattctgggaatcc

SEQ ID NO: 2080 - DNA, 461 bp, Mus musculus
attttaagaacaagcattttattagaaatatgtttcataaagagcacaaatttagttattactataaaatgccacttcatgggatgtcagcattatcatattctattgctggtgtatgtcatgctaaccatgaagtatctttgtattacacatgcaaagagtaaggccagggaggttaacctgctctagaactcaatcaattagtggcagaaccatggcccacagtcttgagttttcatgcattcgctcagtaccaaagtgacaacctcaaaaacaaaaaccctgataaatgtcactttatctttccacttaatgaaaagccaactgttctaccagccactttccagtggtattttggtttcttttaatatcaggatcacagtatatagcagggggaaataatatgttcttgataatcaaaacacaaagtcagactgggaagtgggtatgtccctgagaag

SEQ ID NO: 2081 - DNA, 390 bp, Mus musculus
tatacagcaaattaaagaacccagaaagctgaactcagtaatgacctgggcacaccaattgcaatgttggatttgatggaatcaagagtccaggatggaggaggaagactgaagtagtgctaaatagaatggtttgacaaggagaccgtgctattcatacaggaggcatgctgccttcagctttggtactttggttcttctgcagttgggccctataggcatccagtttactgagcgaggaaataggtaaaagaacaaaccttttcccttcatggtaatctctacagatgactgctaaggaacctacggttttcagcctaatctccctgctggccagggtctacagctacatttagcataacccaaacataacaggaactggatagtaaa

SEQ ID NO: 2082 - DNA, 630 bp, Mus musculus
cagaaaatctgaaacatttaatggatgaaatgcacacacaatataaataagaaagtaacttggataaaaaagattctgaagaggaactgatcaaaacttcaatatatgaataacaatatatgcttgcattacagtgtatagttatgagttaagtgtatttagatttgtaaagaaattgaactataactactgcaagattattccaagaatattcttcaaatgtacaataaaaacacaaagccttgtgcatgttaaacatgactatcacgccaggcaaacaagtccttaaccacgttttaaaatgggttcatttataccatttaaacacacacaaaaaaaggctttcaaaggcattaaaacatagacttcagtgtccaactcacattttgacctctatgctttcacatttaatagttgcattttgaatgtataaactaaaaattttaaatctttctcaaaaagtttatgtctgcatgtcttataagaattatatttgagatctctaatgctaagaactaaaacatgtacttgaaacttaaaagaaaaaaatcataagttcacaatcatgtccactacaacgtccattaagtgacttaaaagcaaacaagtcaaatgcccaggtccttcctc

SEQ ID NO: 2083 - DNA, 464 bp, Mus musculus
  misc_feature (1)..(464): n is g, c, a or t
gcatgtaccgcaagcacctaaactgtacaagatcctgaagacggcaaccaagataacttaaaagtgtttttgtgcagatcatacctccccgcttatgtctgggtgttaagattactgtctcagagctaatgcgctttgaatccttaaccagttttcatatgagcttcatttttctaccaggctcaatcaccttcccaatccacaactttgggatgctcagatggcaccaagaatgcaagcccaacaagagtttttcgtttgagaattgtttcgagtttctgctgatagactgtgtttatagatagtcagtgcccgatggtgaagcacacacaaataggcacatgtgcagagcgatgcagaacctgaggaaggacctgggcatttgacttgtttgcttttaagacacttaatggacgttgnagaggacatgattgtgaacttatgatttttttcttttaagtttc

SEQ ID NO: 2084 - DNA, 733 bp, Mus musculus
atccttcagagtcttttaattctgacaaagtacctggaacatattggctctccaaggaacattccagaaaggccacaaataaactgaaatcatctctgtgaagagaaagatgaaaccaagacccagggaaacccagggacacggcgagatcccagcccaaagaattgtctctgaggtgaagggagaaaacacagggatctaacaggaactggttaagaagacgaggcaaattccactctaaacaccacccgaaagagacactgtgagggccaggccatggcagtcagaaggccacgtggacccatctggaagatggcttgctcaggaccaacagacagactctgggcatctgaaaggcctttaaggataaaagtaagcagagcatgcctcatgctacctctgttgccaagagatcccttctgaagagggagggaaaactgcaggccccagggatctctctatacttggtggaccagtagaacctagaaggaccaaatccttagcctggacagatatgatgcaaggggaacccttttcctgagatgattgtagtttatgtatggctcgtggagatgcaaacaggaatttgagtgagaggccacttcttgcctggggtgttatgaagatgataaagaaggcagaggcctcggccagagcccagcccctccttgtgttcaggagaggtcgtctcccactgtgcctgtgagacactgccctggccccccccccccaa

SEQ ID NO: 2085 - DNA, 668 bp, Mus musculus
  misc_feature (1)..(668): n is g, c, a or t
ccagagccgaggttgcctgaccactgcatctgctgctgcccagggctttgttcaacttcctgtgggaacgcttcaagtcaagtcgtctgaccctgttgatcgctggaatcatggtccatgggtacaaaggggtccagttccaaaactgggcgaagacctatggctgcagtccagagatgtactaccagcccacatcagtgggggaggtcagagaggtgctggccctggcccggcagcagaacaagaaagtgaaggtggtgggtggcggccactcgccttcagacatcgcctgcaccgatggcttcatgattcacatgggcaagatgaaccgggttctccaggtggacaaggagaagaagcaggtcacagtggaagccggtatcctcctgactgacctgcacccacagctggacaagcatggcctggccctgtctaatctaggagccgtgtctgatgtgacggttggtggcgtcattgggtctggaacacataacaccgggatcaagcacggtatcctggccacccaggtggtggccctgaccctgatgaaggctgatggaacagttctggaatgttctgagtcaagtaatggcagatgtgttccaggctgcaagggtgcacctgggcttgcctgggtgttatcctcactgtncaccctgcagtgtgtg

SEQ ID NO: 2086 - DNA, 791 bp, Mus musculus
atctttcagagtcttttaattctgacaaagtacctggaacatattggctctccaaggaacattccagaaaggccacaaataaactgaaatcatctctgtgaagagaaagatgaaaccaagacccagggaaacccagggacacggcgagatcccagcccaaagaattgtctctgaggtgaagggagaaaacacagggatctaacaggaactggttaagaagacgaggcaaattccactctaaacaccacccgaaagagacactgtgagggccaggccatggcagtcagaaggccacgtggacccatctggaagatggcttgctcaggaccaacagacagactctgggcatctgaaaggcctttaaggataaaagtaagcagagcatgcctcatgctacctctgttgccaagagatcccttctgaagagggagggaaaactgcaggccccagggatctctctatacttggtggaccagtagaacctagaaggaccaaatccttagcctggacagatatgatgcaaggggaacccttttcctgagatgattgtagtttatgtatggctcgtggagatgcaaacaggaatttgagtgagaggccacttcttgcctggggtgttatgaagatgataaagaaggcagaggcctcggccagagcccagcccctccttgtgttcaggaggggtcgtctcccactgtgcctgtgagacactgccctgccccccccccccaaggcagcagaagtgaggggtcagggcaacttgcttctgcttctactgtagtagaaaacct

SEQ ID NO: 2087 - DNA, 510 bp, Mus musculus
caacaaggagccctcctctgcatctaactggttttgggactatgccattgggttctacctcctggaattcttgctctggaccagcacctacctgccacgcctcgtgggctggatcaaccgcttcttcttctggctgctgttcaactgcaagaaggagagcagcaacctcagccacaagatcttctcctacgagtgtcgcttcaagcagcatgtccaagactgggccatccccagggagaagaccagggaggccctgctggagctaaaggccatgctggaggcccaccccaaggtggtagcccactaccccgtggaggtgcgcttcacccgaggtgatgacatcctgctgagcccgtgcttccagagggacagctgctacatgaacatcattatgtacaggccctatgggaaggatgtgcctcggttggattactggctggcctatgagaccatcatgaagaagtttggaggcaggccccactgggcaaaggcccacaattgcaccaggaa

SEQ ID NO: 2088 - DNA, 764 bp, Mus musculus
  misc_feature (1)..(764): n is g, c, a or t
ggcttggtgttgatatctccaaggaccatgatatcagagaagtctatccggaatttactcaataaagtagccatcgctctccggtcatggtctattctgtttatttttccaccaatgaatactcggatcttacaatctttccactttttcttggtagtcagaagatagggtatcgacaatgtcaaacctccatcatcaaaaagccaccagacatctatagtattcttcccttgttttttctgaaactgtgtgctagcttcaagaagcttttggtcagctacatttaaaggcacaatagggcctttggattcttttttcaacagtggctgagttggagtcttgccatcctcttcctcatctttctgtgtaatggatttttcaccagatgatttgcaagtatcttgatctgactttttactgtaatccacatttactaccacatccttggtaccaggtgatttttcttgtgaagataataattcttcctgaccttggaggtgtgatatatccagtccttccttcaggcggataaccacaactccaaattgtatgtcaaaagcatcatgaaataagtttatatacatatccacatccctcatatcggcttgtaaccaatctttcttaaatcccaggacaagtgtgtttggcttcatacgaccaagtccagcagcctgcatcaagtattgtgcaccttctcgcaagtcatctgcgtgaaccggagcataganagccttcattttgtttttaatgagccatcgctgata

SEQ ID NO: 2089 - DNA, 544 bp, Mus musculus
  misc_feature (1)..(544): n is g, c, a or t
tgtgggttcgtgtgttgttcgggatgccactggcaatgttaatgataccattacaacagagctgacaaactgtacttctgcagcctgcaaactaaactttgacttctcttattgtgagagcaatacttgttcttacgggctaatgaacaactttcaggtgatgagcatggtgtcaggatttgcacccttgatctctgcagggatcttttcagccacgctctcgtcagcactagcatctcttgtgagtgctcccaaaatatttcaggctctatgtaaggacaatatctacccagctttccagatgtttgctaaaggttatgggaaaaataatganaccgcttcgtggttacatcttaacatttctgattgcactgggattcatcctgattgctgaattgaacgttattgctccaattatctctaatttcttccttgcatcgtatgccttaatcaacttttcagtattccatgcatcacttgcaaaatctccaggatggcgtcctgcattcaaatacctacaacatgtggatctcccttattggag

SEQ ID NO: 2090 - DNA, 816 bp, Mus musculus
aagcacaggctatacagacaattatttacttataatcttggccctttgggggtgggccaaaggtctgggcccagcatgcacccccacttctttggggcccaatccccagctctgctaggtccacaggggccagagtgtcaggccagtggcggtggaggtagcagcaggagtatagtggagagtacagagccacacgggatagacagaggcaagggcatggggacagtaaccaggacccagagctgagtccaaggaggcctggaaggctttgacctgtccgtcgggctgagcctcaaagcaggcggcaggcattgcccacactgttggctgaggtgtcgagatcgtggctgtatggggattcccagtctctcaggaaaacagcctccagctgactgcgcaaccaccatgcccgttctgtgtcaccagcagggaggtgcctgctgtctccgtgaagtagcttccagaccagttggaggttccaatgtatgaggcacgttcagtcaccatgtacttgttgtggttgacacgggcataggggattcgggcctgggactcatccgtaggaccacaaacagtttcacctggatgtcggagtgagtatggttgtcatgaagtgcagccagggagagcaggaaggaccgcatcgatggatcagagtgtccccagcagctgatgagcaggcgcactttgacgcctcgttcatacgcagcccgtctcagcccatcatcgatcgctggccagaacctgcgtggatgagagaactccatggtgggcaggtagttcataaccgcaatgtagatgaagcttcgggcactg

SEQ ID NO: 2091 - DNA, 484 bp, Mus musculus
acacccacacgcaagagccctctgcccagcagggtgaagaggttcttcagcagcttcaggcactggcacctcgaggtgtaaaggttcgcatcgctgtgagcaaacccaatgggcctctggctgatctgcattctctgctacagagtggtgcccaggtccgcatggtggacatgcagaagctgactcatggtgtcctgcacaccaagttctgggtggtggatcagacccacttctacctgggcagtgccaacatggactggcggtcgctgacccatgtcaaggagctgggcgtgggcatgtacaactgcagctgcctcgcccgggacctcaccaagatctttgaagcctattggttcctgggccaggcaggtagctccatcccatcaacctggccgcggtcctttgacacccgatataatcaagaaacaccaatggagatctgcctcaatggcaccccagctctggcctacctagcgagtgcacc

SEQ ID NO: 2092 - DNA, 734 bp, Mus musculus
cttcccaagtttattttacgttctcatgatagttagcaataaatctccaaattgaaagacgtaggtcatttattacagcacaaatatcttagaacacactgtatcagacactgctaaagacctggcaataaatctaagacaaacagttttgactttccaagttggcagtcagtcaagcagaacatagatgcggagaatttacaaacgacacagttactcttaaagtttaagatgctacatgaacatacaactgagaactgtggagaggagatgagattcagcatctgccttcagggtttatctgtagtggttcttttaacattggagttaatctggagtgcacagtaaggaaaaggaggaactgggggaaatcctcctcccttctgagtcttcaaatgaaggcaggaagaagacagctggagagtgaatgggagcattgggaaacttagagctcctggggacttggtatctactaaaaccagagaaagcttactgaatatgacaagagaagatcctgcatgtagtgtgtgctcccagcattccgaaaaagatgcaagacaagaaactggactgcctagataggaccacacaaaatcatgcattgtcccaacatatttgtcaatttttcattatggtcacacactaataactcaatccatagccctcagaacatatttttcaacattctttaccagatcctgttgtctggacattcctcatagcctgctgacttg

SEQ ID NO: 2093 - DNA, 518 bp, Mus musculus
ttgtcaccactcacaccatcttatatgtgaagttgatgagcaactatgattccatgtgcctcatggcagacactctcctcttccttattttcttctcaaagaccatctggagggagtcgggcatctgtgatatgctctgacaacaaaattgaccgttcttgttcagagactttcaagagtctgacattcagatttttccatttatgaaaatgaggtgtttcatatattaaacgtctggatagtgctcttctggggaaggctcaaacctgcttatatcacttgttgtgagccatggagacagtgaagaacagtgcagttatgtctcatagagtgtctgctccagtcccttctcataatttgaattccaagacttagatgaaaagtaagatgggtctctctggttatagcctcaatcctcttgaatactggtgtctatctgtttcatgtcacagggatatgcctctctgtacagtctgctgcccttacactaaaggtagcaccttttgcttttctagcca

SEQ ID NO: 2094 - DNA, 395 bp, Mus musculus
aaccgggggccaagggcagagtcaaaaaaagcagacagagaaaagggagaggagatgacaggagctgagagaagaaaacggagcctccccaaccaagggtccaacagggcaccttcagcccccggggccccgggcaaattgagggccgaggccaaaaagatttgagggacatcgccccccaaaggggcagcaaagcttgcagatccaaaaaaccaacccattaaacattcaagaaaggcctcgggggagtaacccccccgacccaaattcccccggaggcatctgatcaaagaaacttcctttccggcccctaagccccaagaagggaacccggggaaatgccagattgacagctgcagaacccggaacccaggcaggactgcgggggcaagccc

SEQ ID NO: 2095 - DNA, 545 bp, Mus musculus
ccaacctcacttccctcagatatacaaggctgtgactcagtttaccacttgtgtccaaggttgccttcataagttctactcccctgctcataagacctggaactacatagtccttgttaaaatgcagggtctttggcagcaaaggaccctacatgtgttaagtgagcttgccccagcagtcctgcctgggtacagggttcagcagctgtcaatctggcatttcccagagttcacttcttggagctaaggagcagaaaagaaagtttctttgatcagatgcatccggggaaatctgagtcgaggagataactccacagaagcatttcttgaatgtttaatgggttggtattatgaatctgcaagctatgctgaccatgtgggaggcgatgtcactcaaatctatctggcctcagcactcaattagccaggagccccgagagctgaaggtgcactgatggaaccttggtagggaagactcagttatcttctctcagctcctgtcatctcctctcccttgtctctgtctgctttttctgactctgacc

SEQ ID NO: 2096 - DNA, 757 bp, Mus musculus
aagtaaaactccaactttattgaacaaaggaataaatgggcgttttcaagttttcgcgtcatggttatttttaagccatctgaaccatgatagtacttatcaacacgatgtttgtctatttttgtcctttgtattttgtttaattttatattcataagtatacttaaatcaattagcagtatatggtaacacatggtaataatggaacagctctgtagtaactttgcacaaatttgaattttatgcaaaaattttgctttattgtttacattactgggatctaatgtcaactacagacaaacacttctgtattctatctcccagccagaacaaaagtctgtgacataacattttcattatgcaagacttcctttttacattttcagtaagagtgccatatagccttttctgaaacgaaatgtctggggtgctaatgaaggaaacagtttaataagcttatttatttaaatcaaatcctccagtaagaaatggagaatctgctatctttacttaaaaggcggtgtaaatatttatctgtcaaaactacatacccacatgaacaaatatgtgcagttcaacaacatccccttactggaacacgagcattccacatcacagttcccatacggacttttaaaagcctcaaaattccgtgtcttctctggcttgcttctctctggattctacccacgctttattaatgggtcgcttcatatcatcgtctccgtcttcataaatgttctttagaacattcatt

SEQ ID NO: 2097 - DNA, 561 bp, Mus musculus
tagtgagggattaatgaatgttctaaagaaaatttatgaagacggagacgatgatatgaagcgaaccattaataaagcgtgggtagaatccagagagaagcaagccagagaagacacggaattttgaggcttttaaaagtccgtatgggaactgtgatgtggaatgctcgtgttccagtaaggggatgttgttgaactgcacatatttgttcatgtgggtatgtagttttgacagataaatatttacaccgccttttaagtaaagatagcagattctccatttcttactggaggatttgatttaaataaataagcttattaaactgtttccttcattagcaccccagacatttcgtttcagaaaaggctatatggcactcttactgaaaatgtaaaaaggaagtcttgcataatgaaaatgttatgtcacagacttttgttctggctgggagatagaatacagaagtgtttgtctgtagttgacattagatcccagtaatgtaaacaataaagcaaaatttttgcataaaattcaaatttgtgcaaagttactacagagct

SEQ ID NO: 2098 - DNA, 701 bp, Mus musculus
  misc_feature (1)..(701): n is g, c, a or t
atgtgattccatttataggaagagtccagaacagggagatccattgagacagaaagtgggtgcttgtcagggaaggagtgggacgtgaggagtgggctaagcagggtcatggcccaggtggtgacactttgtgcaggcacttcacagctgtgggtctcaggtcacagaagcccaccttcatttaaaacccacacactcccatgctagggctaaccaggtccctgaggatgtccacacaatcagtccaaggtttgccctttcccacgatggagccctctgtggggaggacgctttttttgggcaccctgagtcttgttgctattgtagtctgtgcccatccttcctggctaacattcctcagttctgtgacaccagaggaaaggccctgtaagctactcgggcatagaggattcatttaggtagctgggtgttaggaggggagggtgctggcctcagcagccacctgctggacttgggtgaggaagctggtaggtgtctctgaaagccaagaagccccagcaaggaggatggaagccagtcctggctctatgtctgggtctgctcacgggctgccacgaagtttagcaggtcaatggcagtgacaaccccaaacaccatctgctgcttgctggacatgccattgctgcagtattggatctgctcgtggaccaccagngcgaagtggtccatctccaggatgt

SEQ ID NO: 2099 - DNA, 542 bp, Mus musculus
gaagctctggcagcgccatggctgtggctgtgaaggctgcccgggagctgcaggaagggcagcgctgtgtggtcatcctgcctgactctgtgcggaactacatgtccaagttcctgagtgacaaatggatgttgcagaaaggtttcatgaaagaggagctctcagtgaagaggccctggtggtggcgtctgcgtgttcaagagctgagcctgtcggccccgctgaccgtgttgcccacggtcacctgtgaggacaccatcgccatcctccgggagaagggttttgaccaggcacctgtggtcaacgagtctggggccatcctagggatggtgaccctcgggaacatgctgtcatccctgctggctggaaaggtgcggccatcagacgaagtctgcaaagtcctctacaagcagttcaaaccgatccacctgaccgacacgctgggcacactctctcacatcctggagatggaccacttcgccctggtggtccacgagcagatccaatactgcagcaatggcatgtccagcaagcagcagatg

SEQ ID NO: 2100 - DNA, 775 bp, Mus musculus
ggcggcataaactgctttattggtagcagctgagtggggctcagatatttccagtggcctggaagtccatgtcctccaccaagtcctggaggtaggccttgtactggtcagaggtaagggagataggctggctgttggagatgtgcaagtccacggttttcagtgaagaggctcccccttcccgggccatctctaacagctccttaagacatgtaggaacaaccttgaccatcacaagcctcttgacccatggctggtcctggggccacatttcccccatgcagaaccacagagtgtagcgtggggagtgtccacttccttccatgaaggcaatcagatctgccacgaagggcctgaggtcgaacacggctccgtccttgtccttgtggacctctccatcaggccctcgcccactgtctggaagcagctcctcccccagagcccagaaggcgtgggagtggcctaggcgctgggcccagaggcactgcccagcctgccacagtgccagcccattgcccagccctttgagcacctgccccacgtactccttcacaagcttgtccgtcagaaacccctcaggatcgggcagggtgactggctgccagggcagtgtcatgtcagctgtgctgcccaccagccgcaggcccccgggcaaaagagtgtctgctggaagacctggcggcctcggtagaaggcggtcacctcgaactcccattgttcctcagctagcagctgcttcagtggattttcttggggtgcagggtttaggaagttg

SEQ ID NO: 2101 - DNA, 561 bp, Mus musculus
gttaggcctgctaagccgaagtgcgctccgggatttcttgactttatttcgtcaatgttgagaaaaactttttatatctcaaaatatcgttagaaaaggaagtcccagcgctcggaggcttagctgactttatgggggttgcgtggctgcgagtctcagaactactgtttgggagccccaaaaccactgctggcacccgcgccgcacgggcgcccaattcctcccctggctagagcatggaaaccccgaaaccgcggattttgccctggctggtgtcacagctggacctggggcagctggaaggcgtggcctggctggacgagagccgaacgaggttcaggatcccgtggaagcatggcctacggcaggacgcacagatggctgactttggcatcttccaggcctgggcagaagccagtggtgcctacaccccggggaaggataagccggacgtgtcaacctggaagaggaatttccggtcagccctgaaccggaaagaagtgttgcggttagctgccgacaatagcaaggacccttatgaccctcataaagtgtatgagt

SEQ ID NO: 2102 - DNA, 783 bp, Mus musculus
atgtgattccatttataggaagagtccagaacagggagatccattgagacagaaagtgggtgcttgtcagggaaggagtgggacgtgaggagtgggctaagcagggtcatggcccaggtggtgacactttgtgcaggcacttcacagctgtgggtctcaggtcacagaagcccaccttcatttaaaacccacacactcccatgctagggctaaccaggtccctgaggatgtccacacaatcagtccaaggtttgccctttcccacgatggagccctctgtggggaggacgctttttttgggcaccctgagtcttgttgctattgtagtctgtgcccatccttcctggctaacattcctcagttctgtgacaccagaggaaaggccctgtaagctactcgggcatagaggattcatttaggtagctgggtgttaggaggggagggtgctggcctcagcagccacctgctggacttgggtgaggaagctggtaggtgtctctgaaagccaagaagccccagcaaggaggatggaagccagtcctggctctatgtctgggtctgctcacgggctgccacgaagtttagcaggtcaatggcagtgacaaccccaaacaccatctgctgcttgctggacatgccattgctgcagtattggatctgctcgtggaccaccagggcgaagtggtccatctccaggatgtgagagagtgtgcccagcgtgtcggtcaggtggatcggtttgaactgcttgtagaggactttgcagacttcgtctgatggccg

SEQ ID NO: 2103 - DNA, 452 bp, Mus musculus
gaagctctggcagcgccatggctgcggctgtgaaggctgcccgggagctgcaggaagggcagcgctgtgtggtcatcctgcctgactctgtgcggaactacatgtccaagctcctgagtgacaaatggatgctgcagaaaggtttcatgaaagaggagctctcagtgaagaggccctggtggtggcgtctgcgtgttcaagagctgagcctgtcggccccgctgaccgtgttgcccacggtcacctgtgaggacaccatcgccatcctccgggagaagggttttgaccaggcacctgtggtcaacgagtctggggccatcctagggatggtgaccctcgggaacatgctgtcatccctgctggctggaaaggtgcggccatcagacgaagtctgccaagtcctctacaagcagttcaaaccgatccacctgaccgacacgctgggcacactc

SEQ ID NO: 2104 - DNA, 828 bp, Mus musculus
acaaataggactttttatttgtcactattaaaaatctggattttacactgattcttggactggcggttcatatccgtcagctcgctcaaccttagcgcccgtctcgtctccagctgctttgccagagctgccgccttccccatgcagctccatgagcttgcccaattcaaacttgggtttcttcagcatttttacttttctaacaaagacgtcatggagaggataaatggactggcaagccttttctatgtctttcccaatgctgtctggaatcagtttattaactacttccttcaagtcattagtctgcacctctcgggtcatgatttccatcatcttcttccggatctggcggacttgctggtgctgcgcataggatgtctttcttatctggttgttgcgtttcttagtgaagccaacacagaaaagtcggagcaaatacccatcggtcgtcttgacatcaacgtgagcttcgatcatggtctgccacttcttgaccatggagcacattttgtcccgggtaagatccataccatggaagttagtcagacagtttttgccctgaacgtcctcagtgattagcttgaattttctaaacgcaacttcatcattctgtagatcagcaaggctcacttcaaacacacgacccttgaggccatcagaggcaattttggttccttgagtcctcgtgactagtgtcttcccgatgttcctaatattgaacatggctggagctttcacatcgtaccagtctttcttagaaaatggatcgaccactttcttcttagctcccttcttggcacctttcgtcaggcgcttgttcttgcc

SEQ ID NO: 2105 - DNA, 585 bp, Mus musculus
accatggcggtcggcaagaacaagcgcctgacgaaaggtggcaagaagggagctaagaagaaagtggtcgatccattttctaagaaagactggtacgatgtgaaagctccagccatgttcaatattaggatttttgggaagacactagtcacgaggactcaaggaaccaaaattgcctctgatggcctcaagggtcgtgtgtttgaagtgagccttgctgatctacagaatgatgaagttgcgtttagaaaattcaagctaatcactgaggacgttcagggcaaaaactgtctgactaacttccatggtatggatcttacccgggacaaaatgtgctccatggtcaagaagtggcagaccatgatcgaagctcacgttgatgtcaagacgaccgatgggtatttgctccgacttttctgtgttggcttcactaagaaacgcaacaaccagataagaaagacatcctatgcgcagcaccagcaagtccgccagatccggaagaagatgatggaaatcatgacccgagaggtgcagactaatgacttgaaggaagtagttaataaactgattccagacagcattggg

SEQ ID NO: 2106 - DNA, 670 bp, Mus musculus
aaggtaaggcagagtttaatatttatgtaatcaaagtccaaataaagcttcctccagctggggctgggacagctcatgcccaggccttcaggggcgtgtgtgcggcacagcggcccggctaggccatgtagatgaaggtgttgatgtcggcctcgtccctccggatgtacctgtgttcaatcagccactccacctgctcctttatcatcttcttctgaggcaggaacatgtttttcagaatttctactaattcagtctgcagctgggcattgctaattttctttctcattttcattatttgtatgatggcttcctgggttcttaatattcttagttggactatcccttcattttcttcttctctcattcgttctgtagtgagctgcaacgtctcaatcaaattgattttcccccttttctgtacttttgcattttttatgagactgaagtcctggttcactgagaagagggtgccttctgtaaaatctttgggtgagttgacttgagggtcatacaacaaaacttgccgtttgagcttgggaaaagctactaaagaccataaagtccttctaagttcagcatctgggagttccgttgcaaagtttaagatttcaaaagctgatttctctctaggcctttggttccatgcaaacaacacagccaactgaaa

SEQ ID NO: 2107 - DNA, 154 bp, Mus musculus
aaaaaactaacatctgaggagattgaagcaaagcttaaagaagtgctcttggtacttaaatatgtacaagacaaagatgttgttatgaggtatcacaaagctcagcttacgcgacgtctcatattggacatctctgctgatagtgagattgaag

SEQ ID NO: 2108 - DNA, 651 bp, Mus musculus
acagataaatgcagtttaatactgccactgagaagtacatctcttaacatatacaactttcaggccacagttttgaaggtctgaagtatcaagttggtttgatgaattagccggttggcacttatgaacacatttattgccttgccatctttaaaataagtcttcagagtgtcactgaaacttttggagtattttacaaattctttcttttggtgttcaagtgccctgcggttctggtactgatattttttgaagacattattcactgtatcaagtagttcttttattgcactagctatatccttgattgtctgcagaaacctcactctgtcattgatctcatcaggaatcttactgagaatctgtttaagtgcccgtgccttttcatttaggtcctggaattctggctctggccgctcaatcatgtactcttctacgtcatcagctgccatacgaaggagggactcggtgaagttaacttctacactttttttctctaatattttcataatgatgtcttgtgtgaggcctggattttccttttcagccttaatgaaagcggctctcagagtctgagctgcagacaaatttactcgttctcattaaacacaggatacatgactgcatagagaggcatagaaaccatggaag

SEQ ID NO: 2109 - DNA, 550 bp, Mus musculus
gatccgggagttgaagagggctccaaaggtgggaagtgaagtccgtgcctcagttgccgattgctgttcttctttgtgtaccagtctttatcacatacacataaaaaagggaagaaattcggcagtgaatgattttttttctgcattttagcattgctttttctactgtagttggcttttgaatgaggatgacaatggaagagatgaagaatgaagctgagaccacttccatggtttctatgcctctctatgcagtcatgtatcctgtgtttaatgagaacgagtaaatttgtctgcagctcagactctgagagccgctttcattaaggctgaaaaggaaaatccaggcctcacacaagacatcattatgaaaatattagagaaaaaaagtgtagaagttaacttcaccgagtccctccttcgtatggcagctgatgacgtagaagagtacatgattgagcggccagagccagaattccaggacctaaatgaaaaggcacgggcacttaaacagattctcagtaagattcctgatgagatcaatgacaga

SEQ ID NO: 2110 - DNA, 619 bp, Mus musculus
aatgaaaatatcaactcagcagagttttatttttacagtgactgatgagctacgaaggggaggaggcagtgcgtggagactcaggactcgtctcagccctcacatttagctttcttgcacactggaagagattcatcatctgcttctgatggccgtggtttcttcactgtagaaataattccaaaagcagtttttctagtttctccatggagaaatacagctctgcaatttgtggacacggcagccttgccatcattttcagaaagcccaaacagcagtcctaagtttgccacgtcatatggtcctcttatttccaaaggcctttctgcagcactggacagaattacattctttcctttgcagatctgcatcaaattgagggcattggagattgtgtaccttctcatcgttgcatctctgatagcaggaccatagacaagttcaaagcccaggcctcgctcaattgccacattaacagggggtcttttgaagtaaaatggtaatttctctgttacagttatacagactaaatccacatctaaatgtgtacaagcaacatggaaaagcttttctgtctttggaaagactgcaacaatatcatacagccggggatagtcga

SEQ ID NO: 2111 - DNA, 262 bp, Mus musculus
cggctgtatgatattgttgcagtctttccaaagacagaaaagcttttccatgttgcttgtacacatttagatgtggatttagtctgtataactgtaacagagaagttaccagtttacttcaaaagaccccctgttattttggcaattgagcgaggcctgggctttgaacttgtctatggtcctgctatcagagatggaacgatgagaaggtacacaatctccaatgccctcaatttgatgcacatctgcaaaggaaagaatg

SEQ ID NO: 2112 - DNA, 733 bp, Mus musculus
gcttctaatgtgcttttctctccaggtttgagaattcttgggcctttattgcttgtgaatggcttttcctcttgatcaggtgtaagatgaaaaggcgatcccagagaaatgccggactttagtgacagaatggaatctgagtcggatgacgcttgtctagataagcacgcggcggctgcagcagcttggtgcaaactacttactatggagtttgcgccttcctgaatagctttccagtcaaaattttctgagtcgggggagaaagcgtgttctgaatctggcctctgtagatctttcaaatcaagcgtcaggtcttcagctaatatgccacccacttttctagggctctgcttttcgctctcactcttgagtcttgaaggccttttcttttttggcatggcagaacttatacactcctgtaacaggtcgtcctcagagtcaatgctaagagaactgagagagctgtttcttgagaaacagacaggggtgtcttcgacgtggaaggacttgggagcatacccggatgcctgaggcttactgggctctccttgtgagttggcaggttcagcttctttgattggttcactttctttgttattgttgttttcctggtcaatgtcactaagggaactcagagaggaatttcgagaaaagcaaactggagtattttcaatagcaaaattctgcagtttttcgtcagttgctgcccctctatctggtccgtctttggagg

SEQ ID NO: 2113 - DNA, 221 bp, Mus musculus
aaggattccgaagccaaagttacctgccgcccagaaccaaactcaagccagcaggcagctagtaagtcacaagccagtataaaacatccagcaaacagagcacagtccaaaccagtgctgcagaaacagcccattttcttccagtcctccaaagacggaccagatagaggggcagcaactgacgaaaaactgcagaattttgctgttgaaaatactccagt

SEQ ID NO: 2114 - DNA, 826 bp, Mus musculus
gttacatcagtagctttattacaacacacactgacacaatcagagaaggaatgtcctggcatttcatggaaagcaaaggaaccatctaggcagtagtcatccatattttttttccccaaacaaaaagcaagccttcccatgcgataactcagggaaacagtcttcttagtcctgtctggaaaatatcagctaaagaaaacagctgttgtaacataagccgagaagggaagttttccttcaagatgtccaaatcctacctttcgtccaacagcctaaatggctgtaaggatactccaggaggtgatgcggttggggactacatggggtctgcttttaaggccaatgattacgtcaccacaattgaaaggaaaggataagctgaaaaagtaagtcctatataatgctctttccatttcatttgaaaggttaatgttaccataacattttaattctatcagagatcactgacaaagcacgttactgtatcttcaaaaggaccccgcttttgcaccggcttgggagcagaccatctatggagaaaagattcagtgaccctggggagcaggcactaggctgcctggagtccacaggcagttctggatccaccatgtaaacgacagaaggaaccttgacaatctcccctcaacaatcctgtaacagtcaggtgtttaaattccttcagtgcccaaatgtacaaaagcaacctaagacaaaattattatggcattttgaataaacttgctaacatattacataacttggggaacatagcggcataagtctaggcacagccctagtattccatacagaaagcactgcagatgta

SEQ ID NO: 2115 - DNA, 603 bp, Mus musculus
aattttgccaaagaagtcagccatgaaatggatggacttatttttcagcctattggaaaatacaagcctggtcgatgtgatgacattttgaaatggaaacctcccagtctaaactctgtggattttcgacttaagattacaagaatgggaggagaagggttgcttccacagaatgttggccttctctatgttggaggttatgaaagaccctttgcacaaatcaaggtgacaagaactaaaacagtatgacaacaaaattatagaatgcaaatttgagaacaatagctgggtcttcatgagacagaggatagacaaaagtttcccaaatgcctacaacacagccatggctgtgtgcaatagcatctcgaaccctgtcaccaaggagatgctgtttgaattcattgacagatgtgcagcagccgcccagggacagaagcggaagtatcccctggaccctgacacggagctcatgccgcccccaccgcccaaaagactgcatcggccaacctagtccgtgcctctgagaggaagaaaaatgctgttgtctcattttctcaaccagagaaattaaagagacgagcggcttcgtactggtacacgtgt

SEQ ID NO: 2116 - DNA, 612 bp, Mus musculus
aacgacttttggttgtttttatttcatgtctttagaagatacaccttatattctaacaaggagatcaacaaaggcttaaactctagaactaaaaaccatcaggccacctcctgtgcaaatggaaatcagagagccgcattttatttgcccccatacattcgctcaatgtctttgagataatggttcttcaactccttccttttcagcttgaaggcatctgttaccaaaccagtctcgggggtccatggctctgggcttaaccgaaccttgatcggaatttcaaatcgctccaatttcatggcatttgcagcttctcgaatttctttcagtatttcagcttccatggcgggattattgcaaatatcaacccaagatccttctacccccttctgttgtgccaaaagagtcaactttttctggttaggaaccacaaaactgatcacataggactggtcacttttggcaaaagcacagatgttgtcgatcagtggacaattcttcagtgcagcttctactttcccaagagatacatattctcctgcttgtaactttaccagatctttcttacgatctataatctgtaagcatccatcaggatggaattctccaata

SEQ ID NO: 2117 - DNA, 591 bp, Mus musculus
tcgcccctccttgccaggcagctccagagctagcgggcacgcgagctcctctccaggggcttccttccccttaaggccgggacccagtggcagactcgtagcgagcgaggcagcaccttcgactcagatcacaggagatacacctgttcttaaaagtgaaagaagaaatctgtgtactttattgctggcttccaaagattgctaacttttatctgtatcactaaaattgaattccctcggctatactgctactcttactgctgcttccattattgccttctccaaaaacctaaggctttaagaagccaaagaataacagcaaataaacgccatattagaagccttccactatgaaccttaagctaaatgtgctcaccattatattgctgcctgtccacttgttaataacaatatacagtgcccttatatttattccatggtattttcttaccaatgccaagaagaaaaacgctatggcaaagagaataaaagctaagcccacttcagacaaacctaggaagtccatatcgctctgtcacacacttcgactcactagctgtcatagacatccctggagcagatactctggat

SEQ ID NO: 2118 - DNA, 491 bp, Mus musculus
cactaggtaaagctttattggagtataacttatacagaccccctcatccacaggatctcttgttcattggtcaggtgaactagcctagagccctacctctctggttcctgccatgaaggacccatcgtggcttagggataccttcttcatctagaaatagcctaagcaagaagctctcttactctgcatccctggcttctcctgcattagccagagtccccttcaggtcaaatgtacaggacctgctttccacaaagactgaggccagctcatgtctggggaaggccccttccttgggtggggcctgggaaatcgagtgaaagtattcacaggtccctttctctagggctggacaccgaccctgactttctggcaggagttccaggagaagagctagagcagtcacagaggccagctccagactctggctttctccacactcctctctcagaggccagggtccacaaaggaatgggtttgggacagggccc

SEQ ID NO: 2119 - DNA, 575 bp, Mus musculus
ggctatatttctgcctgtcggatgcctgttccccaccatgatggtcatggactcattctctgaaagtgtatcacatggggcaaggtagtgtccctgtattccgtggccgcggggctagcggtggactgtgtccggcaggctcagcctgccatggttcatgccctggttgactgcctgggggagtttgtacgcaagaccttggctatctggcttcggaggcgtggtggatggacggatgtcctcaagtgtgtggtcagcacagatcctggcttccgctcccactggctcgtggccacgctctgcagctttggccgcttcctgaaggcagcattcttcctgttgttgccagagagatgagctggccaccagggcaggggccactcctagggtccctgggcccaatccaaggggcctccagtacctacaaagcacctccctcactcaaattgggagcatttagcccctggggccctgtcccaaacccattcctttgtggaccctggcctctgagagaggagtgtggagaaagccagagtctggagctggcctctgtgactgctctagctcttctcctg

SEQ ID NO: 2120 - DNA, 518 bp, Mus musculus
caggctaagggcatttattcctcacacagtaagtacagaacatcttgaagcaccagagccagaggtcaggtgggtgtctacttgccgagactgaaggtcagttctgctagggctgggccccgatggcagaaccactctcccactcccacccccttttcctagccagccagcacatcccggcctgtccagaagtggttctgggaagagtgtctattcaccactcagtccatactgggaggcactataggttttggggttattgccacattttacagcacttggctttgttttgccagcaccaatgtatgcctcgggtcctagagttcaaaagatgtcatctcctctgggattggagttacagagttgagagccaccatgtgggtgctgagaatgagaccaactgctcttaactgtggggccaactctccagcccaatattgatttttttttttaaggcaaacagtttaaagacgacacatttgtaaaatggaaaaactgcccagggaatctggggctga

SEQ ID NO: 2121 - DNA, 530 bp, Mus musculus
gccgtgctgggaagatcacctccgctcccaatgtgagcagtttcccgaacgctctttcggagaaggtttcccagagaggtggtggacgggaacatgaggcggcgtctcctcatcctgaccactttggtgcctttcgtcctggcaccccgacctccggaggaagcaggctctggctcccatccgcgacttgagaagcttgattctttgctctcagactacgacatcctctccttagctaatattcagcagcactccataaggaaaagggatctacagtctgcgacacacttagaaacattactaactttttcagctttgaaaagacattttaaattatacttgacatcaagtaccgaacgcttttcacaaaacttgaaaatcgggggggtggacgggaaaagaagaaagcgagtacagcgtgaagtggcagaacttcttcagtggtcacgtggttggtgagcctgactctagggttctagcccacataggagatgatgatgttacagtgagaatcaacacagatggggcag

SEQ ID NO: 2122 - DNA, 222 bp, Mus musculus
aagagaaaaattcatatttatttcaaagcatcatgaaaattatattccatttctttgagaccattaattaaagcttcagctgaatgggagttgctaagcacccaagattgatcaaaaatgacaagtccatccaacagtccattttggtcatattgccagcatcactggccacacacagggacatcaggcagaagccatgattaggcccccatgttaatattc

SEQ ID NO: 2123 - DNA, 567 bp, Mus musculus
tgccaatgaagtcaggggataatgattttccagtaaatgagcaagggaaatctctgttggacactgtggatttctgtgacacatgggagaggttggaggagtgtaaggatgcaggattggtcaagtccattggggtgtccaactttaaccacaggcagctggagcgaatcctcaataagccaggactgaagtacaaacctgtctgcaaccaggttgaatgtcatctctatttgaaccagcgtaagctactggattactgcgaatcaaaagacattgttctcgttgcttacggtgctctggggacccagcgatataaagaatgggtggaccagaactccccagttctcttgaatgatccagttctttgtgatgtggccaaaaagaacaagcgaagtcctgccttgattgcacttcgatacctgattcaacgtgggattgtgcccctggcccagagtttcaaagagaatgagatgagagagaatttgcaggtttttggatttcagttgtcccctgaggacatgaaaacactagatggcctgaacaaaaactttcgataccttccagcag

SEQ ID NO: 2124 - DNA, 752 bp, Mus musculus
ggtgtatctcaaccaggtttttattgttcttgcaactgcaaactacacagatgtctgaaaggaaggcgtgtcctgttaaaaagcttgcaaacttcttcctaggtcacggacagagacaatgacacagaacatgaagaagtcatcagtcacacattgaaaggccccaaaccaatgaacaattaaagccaatctagacagctttctagttttaggctcccttatacatattaaataaataaatagcacatctgctatcaaaataataaaaaaataaacttcaagtattacaaatgaaaatatcattggtgtggttccaacagtttttcttctccccataaatcaagggtagtgcccattgttgaaggaaaggggagaaatttacccccaaaacaaatatgcaacgttaaaaacattggtccccattttattttgctgttttgggtgggagagtggaagttctatgggtgctacccaccccatccaccaagtcactggcttttgaaggatgcatgttccacccgcatcaagatctcctgggcctgatcttattcataggtgttcacagaatgtgaaatcacattgggcaaagctttctcttgatgtattgacttaggctggtcacacatgaccacccctacctgtctcagccttgagagtctctatgttgtaaaagctggttctataaccataaaatggatatggtcaggaggaagcatcgaagaaaccacatttaggtacaaagcatagtacca

SEQ ID NO: 2125 - DNA, 694 bp, Mus musculus
  misc_feature (1)..(694): n is g, c, a or t
tggcccaaggaaggctcatgtcaggccgcctgctcagagctgtccgcatattttggccaagtgtctgctgctgtatgcctcataccaccatgctggccatcttgaggagtcacccccagtgtagaaaagcatccttgtcggctttatggcattggcgacatttttgcatgggttgaaaagtagcgctaatgtctttgtcttcctgtttctcccctttgtccacccatgttctgggggaggacgggacatcccaagcctggaagcaaccaatgggaaactcagcagtgtcagcccaaaggaccctttatgacgatgctgcacaactagggccgaaggtcactctttactttctgcttccttcctgggagtcctagggatcctctcttccccagctcaggggacaacagatcctggggtgacacagggcatgcttcagacactttaaagtcaccttgtgttttcatagctaactactcaaacatttggcccagcccactaccctttatatctgtggttcaccaggatatagatagatgatagatagaaagatagatagatagatagatagatagatagatagatagatagatagatagatgatagatatctccatctgaagacttggactnttttctctatggcttgagtcttgacaaggatatatganactgcagacgtgggctgacatgtgtgc

SEQ ID NO: 2126 - DNA, 652 bp, Mus musculus
ctgtagcatcaggcatgagccaggccagcccgtgtttaatggaaaggaacccaattcagaaggaaggatgacttcttagggtggtcatttatgtgtgggatctaccacttttcccacaaagagggggctctgagagtgttcttcaaatattatgaaaaggaaagggcggttgaagtgcaagatagggggcatagacaaaaaaccgccttgtaagactgtagctgctgcagcttctgttcctgtctcatcgatggtcagcacggccttatgcacagcctggctgagcttcaggggagcattctcctctgtgattccggagaggtcagccccactgttgaagatccgggtgatgcccagtggactcatgagtgtctccaagttatagtttccagagatggacagtctggggatatggatctgggctaaccttctgcgcctgtttagcaggaacttagagatgagctccttgttgagagtttgctccagatgctgcatcttcccatcatcgggcaggaggaagacagcagtggcgttgcccgcgtaatccatcagcagcacccagctggagagcgtgctgcaatggtgcacgtcaagcatgcccgagagggtcatcatgggcaccttcaccgtggtggactcgtcacgtggaact

SEQ ID NO: 2127 - DNA, 527 bp, Mus musculus
tcttagcagactggctccctgacaccctcaggagtcaagaatctgatcctgaggaagagtgggaatcagcacccaccagaggtgcaggaggcgtggctacccggcatctggccaggattctcaggaaaatgactccctccatctcatggtggctactgcttctggcaggcctgtgttgcctggtccccagctttctggctgaggatgttcaggagacagacacctcccagaagaatcagtccccagcctcccatgagattgctacaaacctgggagactttgccatcagtctataccgggagctggtccatcagtgcaacacttccaacatcttcttctccccagtgagcattgccacagcctttgctatgctctccctagggagcaagggtgacactcacacgcagatcctagagggcctgcagttcaacctcacacaaacatcggaggctgacatccacaattccttccaacacctcctccaaaccctcaacagaccagacagtgagctgcagctgagcacaggc

SEQ ID NO: 2128 - DNA, 574 bp, Mus musculus
  misc_feature (1)..(574): n is g, c, a or t
gaaaagaatcagattttaatttgtgatgtgcatttatacagatgaaaatattcacagaggcttgttcgattcctgctcctacataaagaaaatgtatgctgaataaaaaaaatgttctatccacccatcccgccaggggnnannaagtgcttgtgtattccacgattgggattcaatcttcatgaatgttgaagagtttagctacttcattgagatcttcatgttgctcaccgtccttaatgatcttccttgcaattggcattcggttaaagacgttccatagcacaatccccaccacaactttgtccctgaggtagaagatgacacctttgccgtagtcctccccttcaacagggacctgtgggactgcaggggcgctgggaggaattgtgatttccgaagcttctgactctgtctcactctccgaacggataccagttcctgactgctctgtggcagattttgggttgtcatgtgcagttgcttttgcaaaaacaccaactgtgggcaaactactatccaccagaccaatagcttcatagccgacatcagggaccaaatcactccagaacat

SEQ ID NO: 2129 - DNA, 589 bp, Mus musculus
gggaagatccttcctcaatacctcagcaactggaccatggaaaaagtcaaacgagagggagtgaaagtgatgcccaatgcaattgtacaatcagttggagtcagcggtggcaggttactcattaagctgaaagatggaaggaaggtagaaactgaccacatagtgacagctgtgggcctagagcccaatgttgagttggccaagactggcggactggaaatagattccgattttggtggcttccgggtaaatgcagaactccaagcacgttctaacatctgggtggcaggggatgctgcatgcttctatgatataaagttgggtcgaaggcgagtagagcatcatgaccatgctgttgtgagtggaagactggctggagaaaacatgactggagccgctaagccatactggcatcagtcaatgttctggagtgatttgggtcctgatgtcggctatgaagctattggtctggtggatagtagtttgcccacagttggtgtttttgcaaaagcaactgcacatgacaacccaaaatctgccacagagcagtcaggaactggtatccgttcggagagtgagacagagtcag

SEQ ID NO: 2130 - DNA, 812 bp, Mus musculus
aaagttcaagcttactttattaagcagcatataagaaacaatagctttaaagttaaatattgctatggctgtggagtcttattacaagttttcctattcacacccaaccactggtgagtttgtagaacatctcctcatctaaactttcattttggtctttcgcacgagttgagagaaatatgtaaccaccaatgaattcgtggaccaccttgcagtctacttcggtacagatgaaggacaaccggacctcatctgcaaactctacagtgaccatcttgatctcccagttgacattccactgcttcatgttgctgaaccgccaggttttgatggcgtcacctgtgctggcgtccatccgaatcaacctgttgtatgcaattccaataagttcttctctcttgccgccttgaaacctcgcaatgaagtgtgtgatgccgaactcaggcagagactgccaggcttgaatgaatctcatcttggcttcaatcaggctcatctgggctacattttgatgggcctccaagatccgtgctgttatctgtttgctcttatacttcttcaggtaccgcggggacaccagacactcggggttgacgtcggttgtgatctggtcagggatcagctgggggtctgggttcagatgctgcattttcaggaaggaaagaatgttctgaacttccaggttgtaagaactgtctgccatggtcttgcctttggaggctaacctgcaagctgccatccagtgcgcgtactgcttctcgttatcacagcgaaccagatctcattcatgccctctgctacggaattaggag

SEQ ID NO: 2131 - DNA, 665 bp, Mus musculus
gtacaagcagtactggtgcactttcaaagacacgtccatctcctgctacaagagccgagaagagtccagtggtacacctgctcatcagctgaacctcagaggatgtgaagttactccggatgtaaacatttcaggccagaaatttaacataaaactcctaattccggtagcagagggcatgaatgagatctggcttcgctgtgataacgagaagcagtacgcgcactggatggcagcttgcaggttagcctccaaaggcaagaccatggcagacagttcttacaacctggaagttcagaacattctttccttcctgaaaatgcagcatctgaacccagacccccagctgatccctgaccagatcacaaccgacgtcaaccccgagtgtctggtgtccccgcggtacctgaagaagtataagagcaaacagataacagcacggatcttggaggcccatcaaaatgtagcccagatgagcctgattgaagccaagatgagattcattcaagcctggcagtctctgcctgagttcggcatcacacacttcattgcgaggtttcaaggcggcaagagagaagaacttattggaattgcatacaacaggttgattcggatggacgccagcacaggtgacgccatcaaaacctggcggttcagcaacatga

SEQ ID NO: 2132 - DNA, 690 bp, Mus musculus
ctgaagtgtgtctctttattttaacagccttgcaggatcaggtaacagtacagggttcagaggtccattagcccaggctcgggcaatagctcctgtctgactatccagagcactgagccctcgacaaagcccaggtcagacatcagccccaggggtaatccagatcctgggcataagtaggacagtcaaaacctcctccagtgtaaccaaacaagctctcatgaggcggcttgtttccctggcctggctggctccttcccccgaagcttttgcctcaggtagataagcagcactcgggaatgtatcccttttctgatacatgaactttccccagtctggaacatggaatactagcacaacagggggcgtgaccacaacctattagcatctgggaggctcccattgggcatcaagtggcgacacaaagcagggctgtctgctcgggctgagagctgggcacacagagtggccaggcggcagggtgtgccgcaggctctgaaggtgggtggcccttatggtagagaaaccagaaggtctggaagagttgctcatcatccctcatgcggtagaccaggttgtgccaggaggcaggcatcgcatctggaagtccataggtttctcgagccctgtagaggcgcttccagcttggtgtgcctcctgctgcgtttggctgggtcagattcaagatgt

SEQ ID NO: 2133 - DNA, 740 bp, Mus musculus
  misc_feature (1)..(740): n is g, c, a or t
tatcagtcaaccacaacgaagggtaatcaggtgtctccagcgttacccgggccccgagggccagccagggcttcggcctgtggggcctggaggggcaagccagtcctgtctacgagcctggcaatgccccaccacagagcatcatccggccaggaccacctcagagccggctgggagcagagactggagaggtccttaccggcacccagagtgggactcctttggatggggctgggcttggcgctggttctggctctgtttgactccacggttctttgggttcctgccagagcttatcctcttccttctgaaggccattctgtcaaattcagtgccatagcgccgccgctccagagtgcctttgggtggcagaacctcacttgccccgcctgcaaagtcttattcactgctctcaaccatgggctgaagaaggagcccaatgtggcacgggtaggctctgtggccatcaagatatgcaagatgctgaacatagcaccactagatgtgtgccagtcagccgtccatctctttgaggacgatgtggtggaggtgtggacacgttcagttctgagcccatcagaggcttgtggcttgcttctgggctcctcttgtggacactgngacatcttttcgacttggaacatctctttgccatcagtgccgaagccacccccaaagccaccgagcccaccagcccccggtgcccctgtcagccgtgtcctcttccttactgatctaca

SEQ ID NO: 2134 - DNA, 397 bp, Mus musculus
agtcataccatgtcacccactttatgtgcttgaaagtgacagttctctccttccagagatcaaaaggtattacagcgctggaacaagcacacaaacgcgaaatatttaacctaaaaacaacactcacacattccttctgccacttcatcgacgtttctgttactttgccttgcaacctggcttctaatctgcgcttgtcagaaaactgccgctgaagcttctgattctggctctcaagctcctgctgcagattgcgcttatcttcctcatagatcgtagttgttttctccagaatctcaatcttgtactccaaagttttgtttttcttctccagtcgctctatttccaatttctgtcccgagatcactttgtctctttcatttagttttggatagtc

SEQ ID NO: 2135 - DNA, 430 bp, Mus musculus
actaaatgaaagagaaaaagcgatctcgggacagaaatcggaaatagagcgactgggagaagaaaaacaaaactttggagtacaagattgagattctggagaaaacaactacgatctatgaggaagataagctttttttgcagcaggagcttgagagccagaatcagaagcttcagcggcagttttctgacaagcgcagattagaagccaggttgcaaggcatggtaacagaaacgtcgatgaagtggcagaaggaatgtgtgagtgttgtttttaggttaaatattttgcgtttctgtgtttgttgcagagctttggtatctgctgatctctggaaggagagaactgtcactttcaagcaataaagtgggtgacatggtatgactaaaaaaaaaaaaaaaaaaaaaaaaaagggcggccgcacgagagg

SEQ ID NO: 2136 - DNA, 720 bp, Mus musculus
ctaattcaggttgcaaagacaggactttttcattgagaaccgacggaggagcagggaaattgacatttggctagttgcccctggcagccatggagaaacaggcgacttctgttccagagagggcagggctgtaaagctgctcttcaggccagtacagccactctccactgcacttcattcagccagggccaagtttgtagactgcagccgctctgtctcttggcagatgtattgctccactgtgtcacactctgctaagaacacctgaacctttttcaccaaattcttcctttttagcctgctgtctttaaattgttctggtaggaccattgtgtcaatctcctccaagatcttcatgaattgctcaattgttgcttttactttcctatcaagtttgcagagagcctccgcttgcaattccttagccagaaaaccctgctggatgccagaaagctctttattcaattcttgcaggtggttagctatcttctctgcagatacctccaaatctttcagcttctttaactcaacctcttcttctggattgctcttttcaccaattaacatgactcggcaaccattttgcattccaagtgctgacaacggtgtttccatttctttcagagattttcccttaaatatgagcttctgaaaaggtagtggaactcctgtggcctcttcaacaagctgagccaagtcttggacaactgggatagtcga

SEQ ID NO: 2137 - DNA, 581 bp, Mus musculus
agttgtccaagacttggctcagcttgttgaagaggccacaggagttccactaccttttcagaagctcatatttaagggaaaatctctgaaagaaatggaaacaccgttgtcagcacttggaatgcaaaatggttttcttttcatgttaattggtgaaaagagcaatccagaagaagaggttgagttaaagaagctgaaagatttggaggtatctgcagagaagatagctaaccacctgcaagaattgaataaagagctttctggcatccagcagggttttctggctaaggaattgcaagcggaggctctctgcaaacttgataggaaagtaaaagcaacaattgagcaattcatgaagatcttggaggagattgacacaatggtcctaccagaacaatttaaagacagcaggctaaaaaggaagaatttggtgaaaaaggttcaggtgttcttagcagagtgtgacacagtggagcaatacatctgccaagagacagagcggctgcagtctacaaacttggccctggctgaatgaagtgcagtggagagtggctgtactggcctgaagagcagctttacag

SEQ ID NO: 2138 - DNA, 776 bp, Mus musculus
gagacattgcaaaaccactgtttgctcgaagaactctcaaacatcaaggcacaaagaaagaagtctccttggggaaatgaagatgaacagcgttggtggcctgtctgaggtctgaggcagagtcctcgaggaaggcctgggtggtcttgggagggtctggctccggtgcctgaggcgtcctcatgagtactgctccaggaacttcaggtgaaagtctttcaccttgtggagcacggtcttcagtttatccaccggaggagaatggtcattctgaagtggtaagtgccttctcgctgcccaaagccactgccaggcacgacacagatgccagtctcctccaggagcttcatgcagtagaacatgtctggagccattttatgggactgagctgcctccacggccttggcagggatgagaatccgagggaacgcatacatagctccttgcaaggggttgcactggatccctgggacttggttaaacagatcttctgtcagctttgcttttttggccagattaccaaggacgaattctttttccctgctgaattgctcaaaggactcctctcctggttccggtggattcacaacaatgtccatggcggcctgtcctgacactggcggacagaggcgaaccgagagtagcttcaccagctggcctttgatctcggggtgcaaattgatcacctccatgtagcgccctctgtagccacactcgcccatgtagcccttggaggtggagtggagggaggcagctccacgttgctggagtactcg

SEQ ID NO: 2139 - DNA, 593 bp, Mus musculus
aactgctgggctttgaatgtggacgagctccggcgggcattgcggcaagccaaagaccactgtgaccctaaagttctctgcattatcaaccccggaaaccccacaggccaggtacaaagcagaaagtgcatagattttttgattcactttgcctgggaagagaagctttttctcctggctgatgaggtgtaccaggacaacgtgtactctccagactgcagattccactcgtttaagaaagtgctttaccagatggggcacgagtactccagcaacgtggagctcgcctccttccactccacctccaagggctacatgggcgagtgtggctacagagggggctacatggaggtgatcaatttgcaccccgagatcaaaggccagctggtgaagctactctcggttcgcctctgtccgccagtgtcaggacaggccgccatggacattgttgtgaatccaccggaaccaggagaggagtcctttgagcaattcagcagggaaaaagaattcgtccttggtaatctggccaaaaaagcaaagctgacagaagatctgtttaaccaagtcccagggatccagtgcaaccccttgca

SEQ ID NO: 2140 - DNA, 531 bp, Mus musculus
tggctagtattaaacagcaactgtaagatagagggctttctgttctatgtcattgccttcagtatcaaggctgcctggagaaaggatggcagcctcagggcttccttactttcttctccttttttgtcagagcagcctttctgtcctgctctctgctgcccctcccaatataatccatgggtacccaggctggttcttgggctaggttgtgggggccacactcacctcttccctgccagttctaacacgacagacatgaagccagtgttagtgggaagagctgggttttcccaggatgaccactgcatcctctcctggtacgctctacactgctttcaggctggggacctgccaagtgtgggacagttgatgaggaagagacattagcagggcctctggagttgctggcccagccagctgcccacaagccataaaccaataaaataagaatcctgcgtcacagattccagctgggtcctcttccttgccctcgcactggtgctgctctggctgagtaggaatacacccaca

SEQ ID NO: 2141 - DNA, 730 bp, Mus musculus
cagaaagccagtttatttctaagactttgtcataaaacttttagcgggtaccaatagttacctgccatactcgcaccaagttgtctgtatagccagcaaacagagtctggccatcagcagaccatgccaaagaggtacactggggtggctctgccttgctgctggtgctgataacttcttgcttcaattcatctacaatgatcttgccctccaagtcccagatcttgatgctggggccagtggcagcgcagagccagtagcggttggggctgaagcacaaggcattgatgatgtccccaccatctaaagtgtagaggtgcttgccttcattgagatcccacagcatagcctggccatccttgcctccagaagcacagagggatccatctggagagacagtcactgtgttcaggtagccagtgtggccaatgtggttggtctttagcttgcagttagccagattccacaccttgaccagcttgtcccatccgcagacgacgatgatagggttgctgctgttcggggagaagcggacacaagacacccattctgaatgactctcatcctggaccgtgtacttgcagacacccagagtattccataactttatggtcttgtctcgggacccagagacaatctgccggttgtcagaggagaaggccacgctcaacacatccttggtgtgggcgacaaatcgccttgtggtggtgcccgttgtgagatcccagag

SEQ ID NO: 2142 - DNA, 497 bp, Mus musculus
cgctgtggtgcttggctctctgagctatccggtgccatccttgtcgctgcggcgaccctcgcatcaactgcagccatgaccgagcagatgacccttcgcgggacccttaagggccacaatggatgggtaacatattttgccaccacaccgcagttcccggacatgatcctgtctgcgtctcgagacaagaccatcatcatgtggaagctgaccagagatgagaccaactatggcataccacagcgtgctctgagaggtcactcccacttcgttagtgatgttgttatctcctctgatggtcagtttgccctctcgggctcctgggacggaacgctgcgcctctgggatctcacaacgggcaccaccacaaggcgatttgtcggccacaccaaggatgtgttgagcgtggccttctcctctgacaaccggcagattgtctctgggtcccgagacaagaccataaagttatggaatactctgggtgtctgcaagtacac

SEQ ID NO: 2143 - DNA, 851 bp, Mus musculus
aagcttggaaaagacatttaatcaatctcttgatgtctgtgaattactaataaagctacgcacatgttcacagaatgtttgtggctaccaacatgaatgatacgagccattaatttttgggaacatctcccaagctaatagtctccatctcccagcagactcagctcgggctttgcttcctccacatccttccagtaaggaagcagccacggcagagatgagaccttcttgtccagcagtggacagaggtttaagaacagaaactcatttcccattggtgataaatgcaggccatccgataaataggatgagaagtcctggctgtccttctgcatcagggtccacaggtcaaggacatcagtcccacagtctcgggctacttgtaaacacgcatttgcatattcaccaacaactgagttcaggcggtttaatttgcaacccttcaggacgcactccttctcccaggcggcttcgcagagcgggggtggcgtgatagggatgacccgctccctggggacgtccacagacctcaggtactgcaccatgtccctcaggtttgcgctgtactcatccaaggggacgtgctgcttggggttctcatctttgagtgaagagtcattggcaccaaagaagattgtaacggccactgggttttccatcccaggccctttcctgataagtcttgggaggataatcttggcccatctggtgttataacctgaaaatccacgattcagaacatcacactttctgactagtctgtcagccagcaacgagccccatccaccctgctggaaagaaaactgcgtgatggagtcccgaagagcacacgcgaggcagagcagagcggg

SEQ ID NO: 2144 - DNA, 595 bp, Mus musculus
tccgcgctctgctctggcctcgcgtgttgctcttcggggactccatcacgcagttttctttccagcagggtggatggggctcgttgctggctgacagactagtcagaaagtgtgatgttctgaatcgtggattttctggtcataacaccagatgggccaagattatcctcccaagacttatcaggaaagggcctgggatggaaaacccagtggccgttacaatcttctttggtgccaatgactcttcactcaaagatgagaaccccaagcagcacgtccccttggatgagtacagcgcaaacctgagggacatggtgcagtacctgaggtctgtggacgtccccagggagcgggtcatccctatcacgccacccccgctctgcgaagccgcctgggagaaggagtgcgtcctgaagggttgcaaattaaaccgcctgaactcagttgttggtgaatatgcaaatgcgtgtttacaagtagcccgagactgtgggactgatgtccttgacctgtggaccctgatgcagaaggacagccaggacttctcatcctatttatcggatggcctgcatttatcaccaatgggaaatgagtt

SEQ ID NO: 2145 - DNA, 764 bp, Mus musculus
aatgcaactgctgtttattagaaagagcagaggagacagagtgggggccctcaggacaggatggaacaagactgacagtgagctaagagtgtgggcccctcagggcaagatggctcagcagcagcgagctctggctcagcataagcacttgttaccccacttggccatcttgttattgattggcatcttgaagaagcggtcagactgcaggaatgcagcaatcttctccaaagcctcaaaacggcacatgaaagccttcaggtttgggaactcatccagacacttgggctcaaatatacggttctgatccaagacatcataggtgagaaaatccacaaaggtcagcttttctcctgcaaaccatgtgaatttccccaggaacaatgagaattgtttcagctgtgcaggtagctgttccaagtactgaggcttcaggttttcgtggttagaattgtagcagaggcgaaccagctgcatgcggaagtccatgatctggttctccatgatgtctactcgtatcttttcttcttcagtgtcaccacacatgttgtgcttgcgtgcgatgtatctcaggatggcgttactctgggtgatcttgttcttcccgtccatgaggtagggcaggttaggaaagtccagatctagcttgaatttcacgtccagccattggcttctatcatagtcaggagcttccccacagatgtaccgtttctcctcatagctggtatcagtaaactccagaagcatgcggatagcatgaacca

SEQ ID NO: 2146 - DNA, 516 bp, Mus musculus
cgcgggctggttcatgctatccgcatgcttctggagtttactgataccagctatgaggagaaacggtacatctgtggggaagctcctgactatgatagaagccaatggctggacgtgaaattcaagctagatctggactttcctaacctgccctacctcatggacgggaagaacaagatcacccagagtaacgccatcctgagatacatcgcacgcaagcacaacatgtgtggtgacactgaagaagaaaagatacgagtagacatcatggagaaccagatcatggacttccgcatgcagctggttcgcctctgctacaattctaaccacgaaaacctgaagcctcagtacttggaacagctacctgcacagctgaaacaattctcattgttcctggggaaattcacatggtttgcaggagaaaagctgacctttgtggattttctcacctatgatgtcttggatcagaaccgtatatttgagcccaagtgtctggatgagttcccaaacctgaag

SEQ ID NO: 2147 - DNA, 858 bp, Mus musculus
gctaggaacatttagctggtttaatgtacactgtgcttaaccaaatgtctcatggctctataaaaaaaataaaataaaatagagtaagctgggagttagaaagtccacaattccacaagctgagcccaggtttcattcttgctgtccatatagcacacactgagatcccatgtctgccgagcagatccgttcagttcactggtgatggatgaagtatttacacgcatctatttacagtactttgtcaagattacaggccgatattctgttcttccattcctagtcaatctgagtttggtttcctcaatgaaaaaggataaatctgaaaatgtcggctcagctgcttcaccacttgtacgccataatggatgtgagccagagtgaaggcagccgtgagtgtgtaaaggagggcgctctcaaggcgggaggtggctgcacctacgatcaccgctgccacaaccaagaggagaggaagcagtaaccagttcaaagtcgggcacgcgtgctgctcatttggcaaacaattagctgacatgtgatattggcaaaagctgttccaaccatgaagtagaatattctagggtgtatttctaagatatctgaaggtgaccagaggatccacactgtacacaaagtgaagagcaaacacggagagaagaaggggaccatggcttcatagacggacttgtgcttcagcgtgttgcttttatagcttctagaaaagtttaataaactcattggaagagtcacacataatgcacacccaataatcattgcagtgaataggtctctatataagacattagaccaggaaggttcataccaggcctcaactcccacaaccgcagtcactatgta

SEQ ID NO: 2148 - DNA, 544 bp, Mus musculus
tcccgggtcgactatccgtttcattgccctgtcgcgcagtgtcgctgccgctgcggagtgggcgttcagttttcgggtcgtcatggctggctacgaatacgtgagcccagagcagctgtcgggctttgacaagtacaagtacagcgctttggataccaacccactctctctgtatatcatgcatccattttggaacactatagtgaaggtgtttcctacttggctggctcccaatcttataaccttttctggctttatgctgcttgtgttcaatttcctactcctgacatacttcgaccctgacttctatgcttcagcccctggtcataagcatgtgcctgactgggtttggattgtcgtgggcatcctcaactttgctgcctacactctagatggagtggatggaaagcaagcacggagaaccaattccagcaccccgttaggggagctgtttgaccatggcctggacagttggtcgtgtgtttactttgttgtgactgtgtactccatctttggacgaggaccgactggcgtcagtgttttt

SEQ ID NO: 2149 - DNA, 717 bp, Mus musculus
cgcattcaacttaaatgcttttattgacaatgtcttggaacaataagcaaacaatgcttaaaatttttcattcaaattcactttccacatgtcgaaagacctcagggtagaaaaaaataaaataaaaatataaatatctgagaatccatcttaataaataaattgaaaacacaataaaaacgttttcatggaaaactgttaatgtcagaacattcagaccacctcgacaatgcatgatcagtaacatgacaatgaacattgacgctgaaggactacagtacatggatatagctattgatttctatctactggaaaataaagtcctatcttttcttagtttaatattggtcgtttctaattggaacacgctattgccaggaacacagtaggtattgttaaaatcagctgcactagatacaatccagcaccaggttaattccaataatgaacccaacagattagttagtgctatgagaaaactaaggagaaagagaaaagagacacagaccaggccttgactcacatgctctactaactaccagctctcaagtgtcactaggaacaacacactccatgcggttttttgttttgttttgttttgtttttgctacatctctggaagaggtgaggactggaggccagatgtggatgcttgcaagtccttgagggccacagcctggtgtgtttcgcgaacaggtaaggtcctccctaggtcga

SEQ ID NO: 2150 - DNA, 585 bp, Mus musculus
aggaccttacctgttcgcgaaacacaccaggctgtgggcctcaaggacttgcaagcatccacatctggcctccagtcctcacctcttccagagatgtagcaaaaacaaaacaaaacaaaacaaaaaaccgcatggagtgtgttgttcctagtgacacttgagagctggtagttagtagagcatgtgagtcaaggcctggtctgtgtctcttttctctttctccttagttttctcatagcactaactaatctgttgggttcattattggaattaacctggtgctggattgtatctagtgcagctgattttaacaatacctactgtgttcctggcaatagcgtgttccaattagaaacgaccaatattaaactaagaaaagataggactttattttccagtagatagaaatcaatagctatatccatgtactgtagtccttcagcgtcaatgttcattgtcatgttactgatcatgcattgtcgaggtggtctgaatgttctgacattaacagttttccatgaaaacgtttttattgtgttttcaatttatttattaagatggattctcagatatttatatttttat

SEQ ID NO: 2151 - DNA, 765 bp, Mus musculus
ccttttttaatttttttttttttttttttttttttatacagaaacagtttttagtttttaatgaacttgtaaacaaaaagctcccatttcaaaataaaaacaaaatcccagatcgtatagatgtttacagtgattacatttatctaagcaacacacatacatgttcagttgtaagacggtaactaaatttccgtgacaaatatgcttttttttaatagcaagaacattatagagttaatgcagagtcctaaagagaatctagtagtcgctatgttttttttcttaagtcttcactttagatgctgttatttctagcacaggtaagcaggcagagtctttcaaatgctcaaacactggaatctttggttgctaccatatcagctggcttgcaaacaagaagccagccatttaaagaatgttttaagttaacaacttgcaaaccccagggatggaaaaccctaagaacacacaattgtgaacatttacaaccatcacaactgtggctgaagactgttcatgccgttcttctgaaatgagatctcaaagcagtatagttcaaaataaaagattttaacaaaaaaataaaataaaaattggcatatgcacaatttctccaccaatttgtgtgtcaaccatttagttaacttttccacttgaaaaaaaatgcaatggaaaaccggacaccatgtttcactacctcagttaatattcacaaggacagtggctacagctcaggatccgcagtgctacccagagccagtttat

SEQ ID NO: 2152 - DNA, 572 bp, Mus musculus
gaaaagattagtgaaaagaagatgtccactcctgttgaggtgttgtgtaaggggtttcctgcagaatttgccatgtacttaaattactgtcgtgggctgcgctttgaggaagctccggattacatgtatctgaggcagctattccgcatccttttcaggaccctgaaccaccaatatgactacacatttgattggacgatgttaaagcagaaagcagcccagcaggcagcctcttccagtgggcagggtcagcaggcccaaacccccacaggcaagcaaactgacaaaaccaagagtaacatgaaaggtctctaagcatgaattgtggaagagaagcagcagagcagacgattggagcagcgtttgtttctccccaaacctagacattttagttcatatgtacactagccagtggttgtggacaaccatttacttggtgtaaagaacttcatttcggtataaactggctctgggtagcactgcggatcctgagctgtagccactgtccttgtgaatattaactgaggtagtgaaacatggagtccggttttccattgcattttttttcaagt

SEQ ID NO: 2153 - DNA, 774 bp, Mus musculus
gcttttgctgtagtaatcatccagtttattaattcttctgtattagacccagatgtcctgaaagttgagacctacacaaattcagaactagtgctaacaaacgtgtaaagctgcaagtgggaagcttttcacaatactacattcaaggtgcacaagagcccccagtgatcactcggaaatctaccacagtccagtttttccaacccaacaaggtctaaactttgaggaataaggtgcccctcttctgctctgaaaaatattcgatcaaaacgatgcttataagcagcagggatcctgaggttgttatttgctttcgtatcccatgtatactggcaatgtttaggtttgcctaaaaattcccaggcatcaaaaacgttgtcaggtaaaccaccacatttgataacttcttgatctcttaaatttgtatctcctgcaaatataaccgtggttgaatctggagcctcttgcatttttccaagaacagtttttaattgtcttattcgttccgcagaatgttctctggtgctctccaaatgggatgtcataaggcaaaattcatttccacccaaactcacatttacgcatagcaggcttctcatcattttggtatttggaaaaggaataatctcctgacttttaaatttcactcttcctttcttcaatagtatagctgtgaaatatccttcttcattacctgtaataattgtgtactggctgctctcttctttaggtaggcacagtatggggggatacttcctgtagaaatacacatct

SEQ ID NO: 2154 - DNA, 602 bp, Mus musculus
accaagggtggccgcgccagcctcccacgtccttcaagtccgaggcctatgttgatctaaccaacgaggatgcaaatgatacaaccattttagaagccagtccatctggaactcctctagaagatagcagcactatttctttcattacctggaatattgatggattagatggatgcaatctgcccgagagggctcgaggggtgtgttcctgcctagctttgtatagtccagatgtggtatttctacaggaagttatccccccatactgtgcctacctaaagaagagagcagccagttacacaattattacaggtaatgaagaaggatatttcacagctatactattgaagaaaggaagagtgaaatttaaaagtcaggagattattccttttccaaataccaaaatgatgagaagcctgctatgcgtaaatgtgagtttgggtggaaatgaattttgccttatgacatcccatttggagagcaccagagaacattctgcggaacgaataagacaattaaaaactgttcttggaaaaatgcaagaggctccagattcaaccacggttatatttgcaggagatacaaatttaagagatcaagaa

SEQ ID NO: 2155 - DNA, 784 bp, Mus musculus
gctttcaagtagcaaaggaaaattttactctcatgaacctcagtccaacaagaaagaattagcagtcattaagattgagatctggagtagactacaactgaagtctccatctatctatcaatggggcaactttccatgtgctttccaataatgaagtagtgaagcagtccccgtctgccactgcgatgctgtggtgttcctgacgatacagtcactttgactgggcactgaagtgccatccttagaggaagtccatggtgcagaacagttatgagtagaaggtaaggacgctctgatgattcccacgaaccaggaggactggtggcaggtccttcgagagagcttctaaccaagccatatacagagcactggacacagcgcctttccgtgcgactggaagactcatgacaataatgttagctgtgcttgaatgctcctttaataattcatttaacctgatctgtcgatatgtcttagtcttataaagctcaagctcattatctgtgattcgccaaggctcatcttctttcatcttatctgcaatgtcctgttctttatcatcttcgtgaagtctgtacggctcgatcatgtcatcaaaagcaataatattttctttttttggcttggtgttgatatctccaaggaccatgatatcagagaagtctatccggaatttactcaataaagtagccatcgctctccggtcatggtctattctgtttatttttcaccaatgaatactcggatcttacaatcttttcactttttcttggtagtcagaaga

SEQ ID NO: 2156 - DNA, 599 bp, Mus musculus
aagaatccaaaggccctattgtgcctttaaatgtagctgaccaaaagcttcttgaagctagcacacagtttcagaaaaaacgagggaagaatactatagatgtctggtggctttttgatgatggaggtttgacattgttgataccctatcttctgactaccaagaaaaagtggaaagattgtaagatccgagtattcattggtggaaaaataaacagaatagaccatgaccggagagcgatggctactttattgagtaaattccggatagacttctctgatatcatggtccttggagatatcaacaccaagccaaaaaaagaaaatattattgcttttgatgacatgatcgagccgtacagacttcacgaagatgataaagaacaggacattgcagataagatgaaagaagatgagccttggcgaatcacagataatgagcttgagctttataagactaagacatatcgacagatcaggttaaatgaattattaaaggagcattcaagcacagctaacattattgtcatgagtcttccagtcgcacggaaaggcgctgtgtccagtgctctgtatatggcttggttagaagctctctcg

SEQ ID NO: 2157 - DNA, 762 bp, Mus musculus
aaacacttcaacaccttatttttattagaagtaattcaactggcagcacattatcaggactaatctgaatctcaacaggatggtgttacattaccactgctattcctgcttccagaattacatttgcctatattactgcatgtgagtcttaagtttaaataaaagctgatgttcaacatcaaaatgcacacccttcaagaggacaagtgtggggtctgtaaaccctttggcaagagtcaaaacagacagcctaaacagttgccagcctcagagagaaatgggagaggggaatctggcagctcattttgatatttctgatgtgctagcaatgctggacatgcagactaaagccaggggttggatttactcaccgatatcccacaaaacaaattctctctctctctctctctctctctctctctctctgtgtgtatgtctctctctctctctctttctctctcaaaataaaacaaagtacgacctaaatgtgtaccatcttgagatataatgtatacacaccagatctaaaagtgcttctaccaggaaaatagatctggacaagttactgctgagttagcatagagaacagaagaactgtgtgttcttagatgtgagaactaactactgcctaatgggtttctctgttataagatacaatggaaactcacctaaaccctaggagtgaaatatatgttaataaaacctgttcctggcccttgcttgtttataggaggtggaattaattaagaaaaatgtagtatt

SEQ ID NO: 2158 - DNA, 703 bp, Mus musculus
tatggacatttgcactttgtgaaatttgcatttcaggatgtgttattgttatgctttcccttcttgggatgaatgtcagaacctgaatgccacacgcttttcaaatatagttctatgcttcaaagtgttcggcagaagttgagtattaaagatttaaagtctcttagggatagtattcacatagccgcaaggcataaatagttgtgtttttttgtgtgtgtgtgtacttcaaagtcatcttgattcctggctgtgaggtgttccagttgcttctgttttattagatgagaaacaagccctgtgtgttgctgctctgtagactggagttttcataaatcggggaagtactatattccccggagttggtgacactgaggggacagggttctttgcaatgctgaatctacccaacgcataatcattgctgtacagttcaccctcctatcaatgtgctagaacttaaaagccaagtgcaagtccctaaagcattatggataaggctctgcaaggccagtatactgaaagagctctgtgtgtgtttgtttgtttgttcgtttgttttaatttaccaaattgtcattgtaattcttgaagatttttctggcattaaaatcttagaatagtgaaaaggatataaaaattccatctaatgtttatatttctaggacttacctgtactagacatcaaggaatattaaacaaa

SEQ ID NO: 2159 - DNA, 683 bp, Mus musculus
ccagctattaatcatgtttattacagtgagcaacaccaccctggggggggggggggacaactccacagaaactcaagcaggagctgtagacagccactgaaggtcacacgacctcatctgtcactggcattgggttaacctggggtcctccagctgaggctgcctcctcttcaccctcactcggcttctttcggacctctgcgggtggccggggtggggggttggtaggtggttgcttgatggtgcctccaacctgtggccgctccttgggtttaggctcaatgggagtccactgctcacctcggatggcagcagatagatcacactggcaatggccaagcagacggtccccaggatggtggccaggaggaagcctgcaggcaccgacaacaggaagtggagggcagcccggacgtataattcctggtgaggggcccgaaaagcttcaccacagaggtcaggtacttctgtccacatcgctccatggtggacccctttttcctctttccccggggatactccagcagacagatgagcacacctgcagcgatagagtaggcgccgaaataccactgtgtgaaacgtccagcagtagccacgatgcccccagtgatgagaatcaggccagacgccagcgcctgttcgttggcccacatggcccactcgatctgccccatgacgag

SEQ ID NO: 2160 - DNA, 743 bp, Mus musculus
  misc_feature (1)..(743): n is g, c, a or t
gctgctgcgtgtgcgcagggtcctcgtcatggggcagatcgagtgggccatgtgggccaacgaacaggcgctggcgtctggcctgattctcatcactgggggcatcgtggctactgctggacgtttcacacagtggtatttcggcgcctactctatcgctgcaggtgtgctcatctgtctgctggagtatccccggggaaagaggaaaaaggggtccaccatggagcgatgtggacagaagtacctgacctctgtggtgaagcttttcgggcccctcaccaggaattactacgtccgggctgccctccacttcctgttgtcggtgcctgcaggcttcctcctggccaccatcctggggaccgtctgcttggccattgccagtgtgatctatctgctgccatccgaggtgagcagtggactcccattgagcctaaacccaaggagcggccacaggttggaggcaccatcaagcaaccacctaccaaccccccaccccggccacccgcagaggtccgaaagaagccgagtgagggtgaagaggaggcagcctcagctggaggaccccaggttaacccaatgccagtgacagatgaggtcgtgtgaccttcagtggctgtctacagctcctgcttgagtttctgtggagttgtccccccccccccccaggggtggtgttgctcactgtaataaacatgattaatagctgganaacaaannnaannaanaaaaaaaagggccggcgc

SEQ ID NO: 2161 - DNA, 967 bp, Mus musculus
gaaaaggtaatgtgctataatgatattcgtttgcaacatcaaaagcagcagaaatactgaatataatttgattaaatcataaatactgagattgactatgcacatagaaattacatttaggctccatgagctgagagctctctaaaggagatgaggtgcgaaccagcgagatcagctcctggcccatcaatactcccactcgtccgacttcatgtccaggtagctgaggatgttctgggccagtttcacagcctgtttcctggcagccttacacttctcttctccctgtgggtcaacggcatccagagccagcaactgtttggtcagtagctcctccagacggatgtagttcttatcagttcggtttccaccaaatgaaaggacttcgcccaggatctcagacaggttcccaaggatctcccacacggccttgtgtggggggtgctcctcacatgggaacagcttcctcttctcgagggcttccttcaggtccaggtacgtgatcaggatctgcacctcaatcaccgccctcctcctggcctcccggatgcaggggtttttctccagactcacttcatccagctgtccgatcaagccctgcagctctgtcttggccctcaggtacaactcaggagggctctgcgcctggagaagttcattttttatctctctcatcctcttgagaacattttctatttttataatggaatggttctgtcccaggtcaaatgcatgtgtactgtcagcttcctcttctaagtctaggtatttcagtaatttgttgatatcttccaccacctccctccgataaattctgatctctgtacgcccacacacatctagagcatctaagtcagcaatcagtcctgacagcacgcaggataagtgcctgcaagtctcggaactgtccacgcccatcagaagtgcgatcagcgtcctctgggcttgttcactcgcacatgacaga

SEQ ID NO: 2162 - DNA, 644 bp, Mus musculus
  misc_feature (1)..(644): n is g, c, a or t
gactctgtggatacggaaggaaaaggagatatccagcaagctaggaagcgggcggcacaggagacagaacgtctcctcaaggagttggagcagaatgccaaccacccacaccgcatcgaaatccagaatatctttaaggaggctcaggcccttgtgaaagacaagattgtgcccttttacagcggaggcaactgcgtgactgacgagtttgaggaaggcatccaggacatcattctgaggctgacgcacgtgaagaccggagggaaggtctccttgcggaaagccaggtaccgcacgctcaccaagatctgcgcggtacaggaggttattgaggactgtatgaagaagcagccgtccctgccactgtctgaggatgtgcatccttcagtggccaaaatcaactctgtcatgtgcgaggtgaacaaggccagagggacgctgatcgcacttctgatgggcgtggacagttccgagacttgcaggcacttatcctgcgtgctgtcaggactgattgctgacttagatgctctagatgtgtgtgggcgtacagagatcagaaattatcggagggaggtggtggaagatatcaacanattactgaaatacctagacttagaagaggaagctgacagtacacatgcatt

SEQ ID NO: 2163 - DNA, 860 bp, Mus musculus
aaggctttatttattctggtcctgataattttatatggttggttcagtatttcttttgaacttaaaattccaagtagtcccaaataagccccatctgcaatgacagatgactacagttcctgaatattcacaggaccgctgcaccttccacctgccagacaacggcatcagcagcttatcaacagtgtcactttaggaattcacaacttcccagacctccaggtttcattactaccctgtaaatcccaacagatgaagctgaaaggcccacagagaacacatcacctgaacctcatgaagaaccagccacagaatcttgtgtacatcagagcaaaaatacagagtatttattcatttcttcccactagagggacacactgttcttggacagacaaatgaatcatcagttgtcaggagttgcctttggagaatgatcaatgaactccttttcaggggttggaaattgataccagggtccatcacctcgggcacgcatcagccttcgaacttcctgctcctctaaccgtaactcagccttttcagattcaatctggaggatagccagggttttctcgtagttcttttcagggccatcatagaaattccgggcgatccatcttgatatcggatgcttgtaatactcccagtgttcagggatgtagccttctgggatttctgcaagctcggcttcaccaataaatatgttcaccagtgttatgccaattataactgggatcccagtcaacataaggtagaaattcattaacctcaagaagcgagcgtcatagtataaagaaggcttgacgacaaacagtctcttgccatggtccccactgttgcgcacaggagctgggcaagtg

SEQ ID NO: 2164 - DNA, 635 bp, Mus musculus
gcatggtggctcacagccatctgcagctctaggaccaggggatctgacaccctcttctgtacttcatggacactgggcctacatgtacacagacaaacatgcaagcaaaacattcatacaaagaaaccagcaccttgtctccatcccgacttcagtgctgtcagtccccaggtcacttgccagctcctgtgcggcacagtggggaccatggcaagagactgtttgtcgtcaagccttctttatactatgacgctcgcttcttgaggttaatgaaattctaccttatgttgactgggatcccagttataattggcataacactggtgaacatatttattggtgaagccgagcttgcagaaatcccagaaggctacatccctgaacactgggagtattacaagcatccgatatcaagatggatcgcccggaatttctatgatggccctgaaaagaactacgagaaaaccctggctatcctccagattgaatctgaaaaggctgagttacggttagaggagcaggaagttcgaaggctgatgcgtgcccgaggtgatggaccctggtatcaatttccaacccctgaaaaggagttcattgatcattctccaaaggcaactcctgacaactgatgattc

SEQ ID NO: 2165 - DNA, 828 bp, Mus musculus
gggttattatgtgtgtgctttttttttaattatataattcttttatacaaagaaatcatttcattgatctatttacagccttttccaattttcatttccactggagatatatttcacatataatggttaacaatgacttgaactgattgccagtataaccctgggctgacatggggtctctgtccttctcccccctgtaaagagcatgaccccatttttaacacaaacattttgtagtcaagaatcacgggtttttttttaaatgaagaaaaccaaccagaattaacctaatatagtcaaatttccaacacactgtacagttcttttcaaatgtagcatttgcaggtatgagaaaccaaagcaaacacagttcacatcccctctgccttctacaactttctacatccctcaggccaggctgctcctggctcctcctctggttcagccagacaatttactttagacaagctactcttctcttctcttcccttcccttccctatcccagactcctgccttctctcttgcttttcagacaacacaaaaacttccacccaacccttcctgtggttcctttcagtagtctaaaatacactaagtcatttcatgggaccttaccacacatgatacactgtaaaaactgcacttttcttaattggctcaaacaatatggcttggtttcacttgataaaattaatgattcacacacaaacacacacacacacacacacacacacacacacacacacaattaggaggaaaaacttcaaggacatgccactttaaaaaggcatcaatgtaaaaaaataaaagcaaatactaaaaacta

SEQ ID NO: 2166 - DNA, 634 bp, Mus musculus
  misc_feature (1)..(634): n is g, c, a or t
agaataaaagcggccataaactgtacattttcctatttcaagacatcttggttttgactcggcctgtcacccgaaatgagcgccacttgtaccaggtttaccggcagcccatcccagtccaggagctggtgctggaagacctgcaggacggggatgtgcgcatgggtggctccttccgaggggccttcggcaactcagacaaagctaaaaatatctttagggtccgcttccaagacccttctccaggccactcccacacactgcaagccaatgatgtgttccataagcagcagtggttcaactgtattcgcgcggccattgcccccttccagcgggccgccagccccttagagcttcagggcttgccagacctccacgaagagtgtgaagagaacaacccttctgctgggaacctcagagcccagcgacggtcatgcgtggttcctggtgtcatgcagatagacgaggaaagcgccctggattgtggctccagtgtacagacagtggaagacaccaggaacatgaaggcacagcggcctcagcctggcttacgaagagcaagggacaaagcacagtcaggtggcaaaaagaaagagactntggtgtaaagtgtgtattccctgatggggagctg

SEQ ID NO: 2167 - DNA, 395 bp, Mus musculus
caacactacttcattttatttctacctaaagtgacagcagggagtgaggagaccagatggtctgaaggcccccggaccgtggctccgggatgagacttcctgggaaggttctgctatttgctcagtgttttcactgggtaagaaaagcgcaggcttccaggagtggggagctggagcactgcttcaggcgctcggtcgctatgacgtactcctttcccagatacttctccgatgtggttttgccggggatcttggccagacactcagtgttgtcattgaacagaaggtttttggttttagactggaacaggcaaaactctcctggacacctctgtccatttctcccaaactgaacctgttggtcaagcagcacctgctgaaggacggatagtcga

SEQ ID NO: 2168 - DNA, 431 bp, Mus musculus
tccttcagcaggtgctgcttgaccaacaggttcagtttgggagaaatggacagaggtgtccaggagagttttgcctgttccagtctaaaaccaaaaaccttctgttcaatgacaacactgagtgtctggccaagatccccggcaaaaccacatcggagaagtatctgggaaaggagtacgtcatagcgaccgagcgcctgaagcagtgctccagctccccactcctggaagcctgcgcttttcttacccagtgaaaacactgagcaaatagcagaaccttcccaggaagtctcatcccggagccacggtccgggggccttcagaccatctggtctcctcactccctgctgtcactttaggtagaaataaaatgaagtagtgttgaaaaaaaaaaaaaaaaaaaaaaaaaaaaaaaaaaaaggggcggccgc

SEQ ID NO: 2169 - DNA, 627 bp, Mus musculus
ggccctggcgttcccctgtactggggcatatacagtttgcgtgtccaatgggcctctctttccagtgatggccgactaggcctatcttcgatacatatgcagctagagtcaactagtcaaatcactttctaagtgacaaaaaaccagcctttcgttgcaacagatcattgtggatttctacatatttaagtagcactgacttgaggtccccaagccccaagctactggctattttaaaatctagctctccaactgtatgtgtatatttatggaattgcaaacaggtaatatagttgaatttgggagtagcgaattatctatgtagaatgggatgtgacgtccttcgttagatttaaagacggacaacaaatctttgcgtaacattttattcattgtggcacaagatagaattttaagaaacaccactgaaaaatttcattgccaacatgaaaactaagagctgacaacaaatcttcacttaacatgttactcatcatggcacaaggtagaatttcaacaaacaccactgaaaaatttcactgccgacatgaagattaagagcaacacgtcatatatatcccacttagtatataatacactgacccttcggactggaaaaacaagaca

SEQ ID NO: 2170 - DNA, 725 bp, Mus musculus
  misc_feature (1)..(725): n is g, c, a or t
aatttcaagtgttacaactgcaaaaccacttttgaccagcaggtggcagtttgcttcagtattttccattgttttgttttgtttttcaaatcagaagggtcagtgtattatatactaagtgggatatatatgacgtgttactcttaatcttcatgtcggcagtgaaatttttcagtggtgtttattaaaattctaccttgtgccatgatgagtaaaatgttaagtaaagatttgttgtcagctcttagttttcatgttggcaatgaaatttttcagtggtgtttcttaaaattctatcttgtgccacaatgaataaaatgttaagcaaagatttgttgtccgtctttaaatctaacgaaggaagtcacatcccattctacatagataattcgctactcccaaattcaactatattacctgtttgcaattccataaatatacacatacagttggagagctagattttaaaatagccagtagcttggggcttggggacctcaagtcagtgctacttaaatatgtagaaatccacaatgatctgttgcaacgaaaggctggttttttgtcacttagaaagtgatttgactagttgactctagctgcatatgtatcaaaagatggcctagtcggccatcactggaaagagaggcccattggacacgcaaactgtatatgccccagtacaggggaacgccagggccanaaaaaaaaaaaagggcggccgc

SEQ ID NO: 2171 - DNA, 887 bp, Mus musculus
actgaaataattatgttttggtttatttataaatgagagcaaagtaacagtgagcagtatttcaaaagctgagaaaaggcaaaattaacagaactatatacactggagaagggggtgatggcttggaaaagccagacaaaaacaaaaccaatcaaacaaaaccaaccaaacaaaactccaggactaaatacatggcctttatttcttccggatcaaagattttgggtatgatcatataaagacgaacaattaagttttgcaacctagaaatatttacttcttaaaactatattaatactttagtaaactatacaaaaaaaagataaggagacaaacatgtacatttatagaactgcgtatcagtcaggctagatcctgcagagggaattcccagcatgacctcattcatctgtggggacacaagcaatccttgtttggacatacaccatcttctcctgcacgagccgctcttcaccgcttgatggcttccttctacacgtgtgtatgtctagttgtctgcttctcagagcagacatttaccttcctcatccaccagccattggaggagggctggggccacgaaggtgactgatcctacccattcttcgtggagggtttcctggtggccctcttccatcgtcgtatctggaatcagaggagctcccgtagcctcttcttttcttcacatcttgctgaagcagagttttgaaaaagaaaaccacgaattctgctattccccagaagaagtctgttaggcaagacactctccatggggactgattcctgctgtccaacacctgaccattcgagatgtaaaccatcttccctccggttgctgcttcctagcgacagagaagaccggacgcccctgttgtcgggatagtcga

SEQ ID NO: 2172 - DNA, 669 bp, Mus musculus
gacacaggggcgtccggtcttctctgtcgctaggaagcaggcaaccggagggaagatggtttacatctcgaatggtcaggtgttggacagcaggaatcagtccccatggagagtgtctttcctaacagacttcttctggggaatagcagaattcgtggttttctttttcaaaactctgcttcagcaagatgtgaagaaaagaagaggctacgggagctcctctgattccagatacgacgatggaagagggccaccaggaaaccctccacgaagaatgggtaggatcagtcaccttcgtggccccagccctcctccaatggctggtggatgaggaaggtaaatgtctgctctgagaagcagacaactagacatacacacgtgtagaaggaagccatcaagcggtgaagagcggctcgtgcaggagaagatggtgtatgtccaaacaaggattgctctgtgtccccacagatgaatgaggtcatgctgggaattccctctgcaggatctagcctgactgatacgcagttctataaatgtacatgtttgtctccttatcttttttttgtatagtttactaaagtattaatatagttttaagaagtaaatatttctaggttgcaaaacttaattgttcgtctttatatgatcatacccaaaatctttgatccg

SEQ ID NO: 2173 - DNA, 765 bp, Mus musculus
aaagaagaaatttttatttgtaatttaagtgtgttttttggatatgattttttaaaaattttagtagaaaataataaaaaatgaaatagcttatgctgaatataacctggcccaagggagtcacatttacttcagccggtcacatggaactgtctcctaaaacaggttgtctacagcttctcaatcagcagggcggaagacctcctcctccgttgcaaatactagccagaccgaactctcctggcttcagggcatgagccatatgaacaacaatccgggctccagacatcccaattggatggcccagagaaacagctcctccgtggatatttactttttgggggtcaatctccagcattttaatgttggctagcacaaccacactgaatgcttcatttacttcccacatggcaatgtcttcttttttcagtcctgcatatttaagaaccttaggtacggcatatgcaggcgcaagtggaaaatcaatggggtctacggcagcatcagcaaatgctgcaattcgtgccaatggcttaacattgagcctctgggctgcctctgcagtcatgagaaccagagcagctgctccatcgttcagcgtgctggcattggcagctgttattgtgccattttctttctggaacacggtcttgagctttggcactttactaaagtcaacacgcttgtattcttcatcttctttcaccaccacatctggtttacctttcactgagatggtgatgggagtaatctcactggcaaact

SEQ ID NO: 2174 - DNA, 696 bp, Mus musculus
  misc_feature (1)..(696): n is a, c, t or g
gaagtggaggccgcggcgcgtctctctgcccttgacagcctttcgcgtctccatggctgccctggtggctctgcacggcgtcgtccgcaggcctctgcttcgcgggctgctgcaggaagtaagatgcctggaacgaagttatgcatccaaacccactttgaatgaagtggttatagtaagtgctataagaactcccattggatccttcctgggcagccttgcctctcagccggccactaaacttggtactgctgcaattcagggagccattgagaaggcagggattccaaaagaagaagtgaaggaagtctacatgggcaatgtcatccaagggggtgaaggacaggcccctaccaggcaagcaacactgggcgcaggtttacctatttccactccatgcaccacagtaaacaaggtttgtgcttcaggaatgaaagccatcatgatggcctctcaaagtcttatgtgtggacatcaggatgtgatggtggcaggcgggatggagagcatgtccaatgtcccatacgtaatgagcagaggagcaacaccatatggtggggtaaaacttgaagacctgattgtaaaagacgggctaactgatgtctacaataaaattcatatgggtaactgtgctgagaatactgcanagaagatgaatatctcacggcaggaacaggatacgtacgctctcagctc

SEQ ID NO: 2175 - DNA, 397 bp, Mus musculus
  misc_feature (1)..(397): n is a, g, c, or t
aggcataacaaaaacgaaatatttattgtataactacccaccactggatttgaccgagagaggcccccggaagtcatctcaacggtcccattttatttcagagcttcattgtagatcaaagccaaggcccccaggaaggcgacatactcctggaagtttacttcctgatccttgttacggtccagatcatccatcagccttgcaatttcagcatcctgcagcttggagccaatggcgngctccttctggatcaactccttcagctccttcttgctcagggtgtgcttgtcaccttccttgccagagtacttgtggaagatggccacgagaaggccaatggctgantccagagggcatgccatgactgatcactgggctagaagaagcgcacggtcga

SEQ ID NO: 2176 - DNA, 427 bp, Mus musculus
  misc_feature (1)..(427): n is a, g, c, or t
cttcttctagcccagtgatcagtcatggcatgccctctggatcaggccattggccttctcgtggccatcttccacaagtactctggcaaggaaggtgacaagcacaccctgagcaagaaggagctgaaggagttgatccagaaggagctcgccattggctccaagctgcaggatgctgaaattgcaaggctgatggatgatctggaccgtaacaaggatcaggaagtaaacttccaggagtatgtcgccttcctgggggccttggctttgatctacaatgaagctctgaaataaaatgggaccgttgagatgacttccgggggcctctctcggtcaaatccagtggtgggtagttatacaataaatatttcgtttttgttatgcctaanaaaaaaaaaaaaaaaaaaaaaaaaaggggcggccgcgg

SEQ ID NO: 2177 - DNA, 672 bp, Mus musculus
gggattcacactttattgagaaccaaatggggcttagctgcttaccctgaggaccaaggcagcacacagacagatctaatctctcaggccaggccggggattctcgggtctagtacattcctccaaccatcactgagggaagggctggatgcagggcagagacaagggataggaggagactaatgaagaaatggagagcccaaggacccagaggcttggctgagggaagggctgggaagaggaaatggaggaatagggaatggaaaggagaagaaagctgcacgtggtaagagctagggccagcagagcactcatgagtattcccccaggtctgggctttgtaatcccactttgggttccaaaaggccatctttgcaaagattggcttggaaaggaagcggctgctcttcatgtagtcagatatcttcttcaggccctcaaagcgacccatgaagtccttcaggtttgggaaggcatccaggcacttgggctcaaatattcggtgttgatcaaggacatcataaacaagaaaatccacataggtgaccttgttccctgcaaaccatggctgcttgcccagaaactcagagtagagcttcatcttctcagggagaccctctaagtactctggcttctttttctcaaagtcagggctgtagcaaaccatggcca

SEQ ID NO: 2178 - DNA, 300 bp, Mus musculus
  misc_feature (1)..(300): n is a, g, c or t
tctggacaccagcactatgtctatgacactaggttactgggacatccgtgggctggctcacgccatccgcctgctcctggaatacacagacacaagctatgaggacaagaaatacaccatgggggacgctccngactanngaccgaagccagtggctgagtgagaagttcaagctgggcctggactttcccaatctgccctacttgacccccggatcacacaagatcacccagagcaatgccatcctgcgctaccttgcccgaaagcacaacctgtgtggagagacagaggaggagagga

SEQ ID NO: 2179 - DNA, 705 bp, Mus musculus
aattttaaatctgaatttatgttttgaaataaaattgcaaggtaacaaacttttataaaattgtcacatgggaacacactttaaaataccatcacatgctgcattcacttagaaagcgttaacaacaaagccagtctaaacaagaatctatccgttacaatgtgagttccttcctttctttgtgcaacaaggaagcttaggagaaatgctgcgagagccagcagtgactcagcacccccataaggaggccaggagcagagcacagtctccctgaggatggactgcagcccgcagcttctccacatgggctgcagggctattgctggatgctttccaagtcctgtgtgccctggccctttcgtttctagcacagtataaatatcaccattatttttcctttctttgtaaacgtcaacagaaaagtcagcatgctacagactctggacatggagtccagtgaactttcttcagactctcagccctctgggaaagcctttttgcagaagtttgtgatctggttcactttcccacgtggtaacttggacatcatccacacaaaccagaactcacaaggggggtggggtgaggggtggggagtccagctggcaggccttttctgaagatgtgcccatggctctgccaagtctctgctctggctcaaaccacattctctccaactacagtagatttcatctctccttttct

SEQ ID NO: 2180 - DNA, 577 bp, Mus musculus
tcaaacagagcttaagaaaaggagagatgaaatctactgtagttggagagaatgtggtttgagccagagcagagacttggcagagccatgggcacatcttcagaaaaggcctgccagctggactccccacccctcaccccaccccccttgtgagttctggtttgtgtggatgatgtccaagttaccacgtgggaaagtgaaccagatcacaaacttctgcaaaaaggctttcccagagggctgagagtctgaagaaagttcactggactccatgtccagagtctgtagcatgctgacttttctgttgacgtttacaaagaaaggaaaaataatggtgatatttattcctgggctagaaacgaaaggggccaggcacacaggacttggaaagcatccagcaatagccctgcagcccatgtggagaagctgcgggctgcagtccatcctcagggagactgtgctctgctcctggcctccttatgggggtgctgagtcactgctggctctcgcagcatttctcctaagcttccttgttgcacaaagaaaggaaggaactcacattgtaacggatagattc

SEQ ID NO: 2181 - DNA, 702 bp, Mus musculus
gaaagaaatgttactccactttaatatagtctgtagtatcatacacatcggtgctcagtagtgagacatccaggccttctgcccagggcaggggtcacagcagcgctccactgagggcctggtgcagccgcctcccgcagtccagtggtgaagaatggagccaccccattcacaccccaagcttcctcttctggtcaaagtaggcctcgaatctggcttgggcatattccatggacccaaattcaatggatgagatcttggcctgtacaatggaccaaagtccccagaggaaatgagaggcaagagcaaatctgttgacttcaagcaagatgtcttcttttgtagcaaactgctcttcactactggggctttcaaaatcattttggaatgtagtcaagtaactggaaataaaatggagctgttgttttcgggaaggatacttctgaatgttcgctctgaagaaaggatacttctcataggtataatcatacatccattcacagaaatgatttccaatgtcaaatcccctgaaattgcaactgctgtactcaaagtcaataagcatcagcttccgcctttcagagttctcctggccttccaacaataagatattaccttcttgacagtcattatgacaaaatacaactggagatccagtatactgcagcaatgacctcaggttctcgagctcaagaggcaggt

SEQ ID NO: 2182 - DNA, 525 bp, Mus musculus
tgaatttcaaggggctgaggcgatggttctggagagtgttatgtttgccattcttgcagagaggtcacttgggccaaaactctttggcatctttccccaaggccgactggagcagtttatcccgagccggcgattggacactgaagagttacgtttaccagatatttctgcagaaatagctgagaaaatggccacatttcatggtatgaaaatgccattcaataaggaaccaaaatggctttttggaacaatggaaaaatacctgaatcaagtactaagactcaaattcagcagggaggccagagttcagcaactgcacaagatcctctcttacaacctgcctcttgagctcgagaaccctgaggtcattgctgcagtatactagatctccagttgtattttgtcataatgactgccaagaaggtaatatcttattgctggaaggccaggataactctgaaaggcggaagctgatgcttattgactttgagtacagcagctacaattacaggggatttgacattg

SEQ ID NO: 2183 - DNA, 809 bp, Mus musculus
cacagctcctgatttattgccttgagagtccagagcacctggtaacaaaggtgctggaaaaaggttagggtgagggccacgccgctgaggcattgggcccagtggtttaaaaactcccacctgcaatacacaggccagggggaaggcctgggcagtggggggtgagggacaggggctggacatgactggcagagggtccagggacagcttcagaaagacagccgtgggtacagatggggacagagcagggacgcacatagccgttggactccttagacacagatgtaatgaggtacagggccagggcctgagctacatgacgcagcatctggtcttgtgcgtgtgtgggtctttgaacctcagtctctgcttaggccggtacttctccaggtaggtgagctgcttgctgttgatggccccacggcgcttctgtcggatgaactggatggcgtcctcgtacttcatcccgctctcgatgagggcgagagcacgagcactggggcccttcccaggcccgccacacagtgcacagctacgcagcttcccgggtcattgtagaacttggccttcagcaggctcagccagtcctctaccactttgccaggagggggcgctccatcatcaaagggccagtccacaacagtgatgccgtccttctccaggggggtcttgtcataggtcacctcacacacgcgcaccacagtggtagccccgtacttcttcaggtcctcgatgaacgtgctgagggtggcattgctggggttgtgggtgatgaggagcgcatgtgccggtagctcacctccacaggc

SEQ ID NO: 2184 - DNA, 557 bp, Mus musculus
ggtatttgcacaatatttgtgcggggcgtaggggcgaggttttaagaagtcttttctttgtggacaagcacggggatctcactggacttggtgtggggggctgggggaccccccgtgcagcccttgctggctagtcccctctgggtccccggaggaggcatggcccgcatgaaccggcctgcgcctgtggaggtgagctaccggcacatgcgcttcctcatcacccacaaccccagcaatgccaccctcagcacgttcatcgaggacctgaagaagtacggggctaccactgtggtgcgcgtgtgtgaggtgacctatgacaagacccccctggagaaggacggcatcactgttgtggactggccctttgatgatggagcgccccctcctggcaaagtggtagaggactggctgagcctgctgaaggccaagttctacaatgacccgggaagctgcgtagctgtgcactgtgtggcgggcctgggaagggccccagtgctcgtggctctcgccctcatcgagagcgggatgaagtacgaggacgccatccagttcat

SEQ ID NO: 2185 - DNA, 486 bp, Mus musculus
aagtgcaagtcagagtaaagcactttggcatgcaaagtcttattaggtttcagctacatgctaaatctgactcctaagttttgctaaaatgccaagatacagagtttctatctaagaataaagttgattttgtatagtttatcacctctttctagcaacagttaattttatgttattcccaaacataataccatacttactcccatagcagcaaacacaatggcaaaattttcttcactatagtccactacatctttggatttctttaccaaaccagcctggcggcagatctgagctgcaatctgttaaggatgaaaactaaaaatcatatcctgacaacaaagtaatttattcttctctcttgaatactttaattagtagcctgaattaaaacatcaagtccgtggtaggtaagctgatgtgtgtattccccccgtgactacacacggcacgacaagtccatctgccctcacctcggatagtcga

SEQ ID NO: 2186 - DNA, 500 bp, Mus musculus
aggtgagggcagatggacttgtcgtgccgtgtgtagtcacggggggaatacacacatcagcttacctaccacggacttgatgttttaattcaggctactaattaaagtattcaagagagaagaataaattactttgttgtcaggatatgatttttagttttcatccttaacagattgcagctcagatctgccgccaggctggtttggtaaagaaatccaaagatgtagtggactatagtgaagaaaattttgccattgtgtttgctgctatgggagtaagtatggtattatgtttgggaataacataaaattaactgttgctagaaagaggtgataaactatacaaaatcaactttattcttagatagaaactctgtatcttggcattttagcaaaacttaggagtcagatttagcatgtagctgaaacctaataagactttgcatgccaaagtgctttactctgacttgcacttaaaaaaaaaaaaaaagggcggccgc

SEQ ID NO: 2187 - DNA, 513 bp, Mus musculus
gagggggtctgtagcttcctcttttattggacacttggtagatgacacatagatctacactgttaaataattattaaaatactgaccaggactaggccctggcccagagctccaaaccagaagcaataaggaacggggttgatgggctggcagtatttctccaacatcaccgaaacccataaaatgaggctcttgaatccttccagggccagaccagggcttgggcccttgggttaacccaggtacccctggctgcatctttcagggcaaggtaaccagcaagggtctggagagaacagccagccgagtccagacagacagacccaaatggaaggagggtgggaaaacggacaggtgctgtccagctggagatatgatgcagcgaaggcaggctgaggggagaggctgagggcagtattgcagcagtgcaggagtgcagccccagggtcctgtcctgagtggctggtcaggtgtcagctggcagtctccaggtggcattcctgacccaagcct

SEQ ID NO: 2188 - DNA, 667 bp, Mus musculus
ggaaacagcaggtgagcccaatccggaacctgtcggatgggcagaagtgccgagtgtgcctggcctggctggcctggcagaaccctcacatgctctttctggacgagcctaccaatcacctggacatcgagaccattgatgctctggcagatgccatcaatgagtttgagggtggaatgatgctagtcagccatgacttcagactcatccagcaggttgcacaggagatttgggtctgtgagaaacagacaatcaccaagtggcctggagacatcctggcctacaaggagcacctcaagtccaagctggtagatgaggagccccagctcaccaagaggacccacaatgtgtgagccctcagccaggcttgggtcaggaatgccacctggagactgccagctgacacctgaccagccactcaggacaggaccctggggctgcactcctgcactgctgcaatactgccctcagcctctcccctcagcctgccttcgctgcatcatatctccagctggacagcacctgtccgttttcccaccctccttccatttgggtctgtctgtctggactcggctggctgttctctccagacccttgctggttaccttgccctgaaagatgcagccaggggtacctgggttaacccaagggcccaagccctggtctg

SEQ ID NO: 2189 - DNA, 594 bp, Mus musculus
ggcagcgcttatcccaacactaaaatttataagggaaaaacgtttatttaaactgatcattatcaaataaatcagtagtacatgtatcacaaaagtttgacagctatataataataatgttataaaatcagttataaaaaactaacccatgagaatacacagaaaaaaatgagttttagtttattatataaagaaaataaactttaccttccaagagtttttgacatgatgtattcgtctcttaattccttaggataaactgactgatcatctttatttctacatagtgaaagtgcgatttcagagttgttactcagaggacagcgtttgcctttcccaataagctcggtatttacgaaggttccatttccactgtgatcctctatgtatacgatgtaacaatttttagggcccatttccctgaaaatacgaaaatgcttcttgctgtaagtccggtacttgtccgtccttctcaacagtggtccatcgaagcaatattcacagcttttatctctcccaaaccagtagttgtcgttaacacagtctagattggagaatccatcctgaagagcccatagccgagcccaaggggca

SEQ ID NO: 2190 - DNA, 613 bp, Mus musculus
cacctggacggaacccctaaaactccggtaaagatcatccttgtgttgcctaattttatgtcaacttgatgcaagtttgagtcatctgagaggaggaaaccttcactgggctataggtcggatatgaagagtcatcatcagtcccacagcagcacctcctcgaaggctcatgacagtgcttcctgttcacagtcccagggtggcttcagccagccccaaggcactccttctcagttgcacgagctctcacagtatcagggttcgtccagctcctctaccggcacagtgccgtcctccagccagtcctcgcactccagttctgggactctgagctcgctggagacagtgtctacccaggaactctgttctattcctgaggaccaagaacctgaagaacctggtcctgccccttgggctcggctatgggctcttcaggatggattctccaatctagactgtgttaacgacaactactggtttgggagagataaaagctgtgaatattgcttcgatggaccactgttgagaaggacggacaagtaccggacttacagcaagaagcattttcgtattttcagggaaatgggccctaaaaattgttacatcgtataca

SEQ ID NO: 2191 - DNA, 602 bp, Mus musculus
accaaaaataaaaaaaatttatttaatggagtggttaaatcttgaaatacaccaagaactatatcatagttctctattctctttatctcaaatcagtggttgtaatttctcctgaatagtttacatttcaagtagatatacagcttgtacttaaagacttaagttataattagaaattagttttatatacagaaaattcataaatatagaattttattctcattttgtccttcagatatgcaaaaaatcgactaaaaacttcatctgagtctttgtaataaacatgtaaatacatatttacagtggggatgcttcctgactgagagtaaatgcacagaagaaattttggtcttcaccagaatccatcattatgcgtccattcctgaagatgatgtgtacggttacatcatgttcattccaatgcaagattcctttcaagcacataattcaaacagagcgacaattttcttattcaatgaatgcttcattctgcatctcaattttcttttaaaacagactccttaatctaacagtagggagcttaaaaagttttcgtacaattatgtgcaactttcactctgctctgacattatcacctcatc

SEQ ID NO: 2192 - DNA, 654 bp, Mus musculus
tgaaatatccatgatatttgcttcaagcatccttacacagtctgtacttgcaagtccttgacagcgactatgtttgcatcactgcaaagggccagctgctagaggggcctggtactggtaggagccaacaatgctgttataatgggtaagagctaaatcagatcaactttaatgtcttatgcccctaatgttttatttgtaggtgtatttctccatgtgttggcagacacactgggcagcatcggcgtgattgtgtccacagttctcatagagcagtttggatggttcattgctgatcccctgtgttctctttttattgccgtgttgatatttctcagtgtgatcccactgattaaagatgcctgtcaagttctacttctgagactaccacctgaccatgaaaaagaactgcatattgctttagaaaagatacagaaaattgagggattaatatcataccgagaccctcatttttggcgccattctgccagtattgtagcgggaacaattcatatacaagtgacatctgaggtgctggagcagagaattgtacagcaggttacagggatacttaaagatgcaggagtaaacaacctaaccatacaagtggaaaaggaggcatactttcagcatatgtccggcctgagtactgga

SEQ ID NO: 2193 - DNA, 545 bp, Mus musculus
gtaactgttataaacgttttattaaagttatttacatttcaaggccctatttacatgggaaaattggatagattttaagatttttttaaaaaaacaattaaatacaaatctgttaaaaggaaaaagaaaaaagatgggaagcataaaaaaaagttcttttatactatttaagtttgaggcagttaaaattatggctgaagcttacagtcccaaagccccagccaaggttgtgaggttaggctttgagcatgcattttaattccagcgcatcagttctgtcagaaggaaccgttctccttactctcacgagagattccagctcctcctcgagttaggtcagtttatgcaccagagtttcgaagctgttcgagtttgtgtttcaactgttctcgtcgtttcctcaataagtccttttcagaggtgagcttgtgctcgtctgcttgaatggacaggatgtaggcggtggcttttttgaggatcactaccttgggggccttttcgttgttttccaattcagggatctggtcacgcagggcaaaaaagct

SEQ ID NO: 2194 - DNA, 651 bp, Mus musculus
gcagagcgagctgcagccgcccgcgcccagtgaggatatctggaagaaattcgagctgcttcccaccccgcccctgtccccgagccgccgctccgggctctgctctccatcctatgttgcggtcgctacgtccttcttttcaagggaagacgatgacggcggcggtggcaacttctccaccgccgatcagctggagatgatgaccgagttacttggaggagacatggtgaaccagagcttcatctgcgatcctgacgacgagaccttcatcaagaacatcatcatccaggactgtatgtggagcggtttctcagccgctgccaagctggtctcggagaagctggcctcctaccaggctgcgcgcaaagacagcaccagcctgagccccgcccgcgggcacagcgtctgctccacctccagcctgtacctgcaggacctcaccgccgccgcgtccgagtgcattgacccctcagtggtctttccctacccgctcaacgacagcagctcgcccaaatcctgcacctcgtccgattccacggccttctctccttcctcggactcgctgctgtcctccgagtcctccccacgggccagccctgagcccctagtgctgcatgaggagacaccgcccaccaccagcagcgactctga

SEQ ID NO: 2195 - DNA, 514 bp, Mus musculus
aatcaaagtaagcaataatgacaggttttatttaaaaatttccagtagagaaaaaccctgctagtgttggaataaaagtactcgctgtataagagcaaaggagaataaaaaaattaacagaagaaaagaaaccaaatagtacaaaaaaaaacaaatcaaaataaaacaaaaaacaaaaacaaaaacaaaaaaaacaacctttgaaatggattccaatagagagatctttaatcctgcgaataatgaacagagttaccaggtttggcaaacaatttatttggaaatcaaagcctatgtctgtactgtaaactccataaaaactgctcattcaattcaagcttttcatatactgggtactgaaacacgaagccagttgatttgcgaacagaaggaattactcatctgctctcacagttagagggattaaccagctgcttaactgtgccgtggagcggataagacagaagaaaagaagtcagataaaactctactaagactgaaacacagcaaattc

SEQ ID NO: 2196 - DNA, 589 bp, Mus musculus
tttttttttttttttttttaatcaaagtaagcaataatgacaggttttatttaaaaatttccagtagagaaaaaccctgctagtgttggaataaaagtactcgctgtataagagcaaaggagaataaaaaaattaacagaagaaaagaaaccaaatagtacaaaaaaaaacaaatcaaaataaaacaaaaaacaaaaacaaaaacaaaaaaaacaacctttgaaatggattccaatagagagatctttaatcctgcgaataatgaacagagttaccaggtttggcaaacaatttatttggaaatcaaagcctatgtctgtactgtaaactccataaaaactgctcattcaattcaagcttttcatatactgggtactgaaacacgaagccagttgatttgcgaacagaaggaattactcatctgctctcacagttagaggaattaaccagctgcttaactgtgccgtggagcggataagacagaagaaaagaagtcagataaaactctacaaaaactgaaacacagcaaattcagacaccagcttgtctgtttaaggcagcaggctgagctttacggtatagtctacat

SEQ ID NO: 2197 - DNA, 632 bp, Mus musculus
gagacagggtttctctgtatagctctggctttcctggaactcactttgtagcccaggctcctttctagaattttctatgtctagcaccctcaaattcagctgcaggctttctccttcctgttctaggactccggtggcaggtcaaggacaactggggacagaacacctggtttccctgagcctgtgggctctctaacagaaaccttcgccagacacctaggtgtctaagaactaagaatgagggcttcgtgttccactttccgaggtgtgagctgtggggttcactgagggtcaggcatggcgaacatgtgcagccgctcacctgcttcacagctcctgcagtcagctgcttcctaactgactaacccgtgagatctccagggccactaacaatgacagaggaaagaaccaaaagcctcaagatgcccccggcaagcagagatcacctacctgcctacagtgtaaggggagacgagggctggtgacaggcaggggcaaggctggggtacatgacacagtcctgcctaaagagcgccccatatactgtacttccacagttcacatggcctagacacgtactggagtaacggcaggtgacacacgggatagctggcaaaggcagacaataggtg

SEQ ID NO: 2198 - DNA, 503 bp, Mus musculus
ccctcaaattcagctgcaggctttctccttcctgttctaggactccggtggcaggtcaaggacaactggggacagaacacctggtttccctgagcctgtgggctctctaacagaaaccttcgccagacacctaggtgtctaagaactaagaatgagggcttcgtgttccactttccgaggtgtgagctgtggggttcactgagggtcaggcatggcgaagcatggcagccgctcacctgcttcacagctcctgcagtcagctgcttcctaactgactaacccgtgagatctccagggccactaacaatgacagaggaaagaaccaaaagcctcaagatgcccccggcaagcagagatcacctacctgcctacagtgtaaggggagacgagggctggtgacaggcaggggcaaggctggggtacatgacacagtcctgcctaaagagcgccccatatactgtacttccacagttcacatggcctagacacgtactggagtaacg

SEQ ID NO: 2199 - DNA, 685 bp, Mus musculus
gttgcatattttattttaaacgcttaaggggtgggtcaaactggtatgtttaactctggatacattatctaaatcccctattacccccaatgaattatagatgaaagctgattttgtctggtcccaaatagctattactatgaatttgtttccaagaaattaacagaataaagattgattttttttccccccacactggaatgtagaccagacaagcttaacctgcgacttcagatctaaggaagcgttaatgcctgtttaagcttcagtggaaaagctgtcttcttggctcagctgaatacaagagggtgcaaagaagaagtttttcatcattgcatctgaagtaattccagcatcttgcatctcataccaatcactgaatgacatcatgaaataaatagctggcctctgaaaatcattaaaagcagatggttcgtggaaagaatctgctcccatgttatcaaagataagccaatctcccacattcagctcaggaagaagacagctttccacaatttgatcaagctcatcacaggatggaccccaaaggctgcttgtaaacagaggctcatcttccttgtatttcttgtgaacctctggaatggtatttaagtcctcagaaagcttactcgcaaaagaaccataaacaccatcattcatgtaatacacgaaggctggctcatca

SEQ ID NO: 2200 - DNA, 678 bp, Mus musculus
tttttttttttttttgttgcatattttattttaaacgcttaaggggtgggtcaaactggtatgtttaactctggatacattatctaaatcccctattacccccaatgaattatagatgaaagctgattttgtctggtcccaaatagctattactatgaatttgtttccaagaaattaacagaataaagattgattttttttccccccacactggaatgtagaccagacaagcttaacctgcgacttcagatctaaggaagcgttaatgcctgtttaagcttcagtggaaaagctgtcttcttggctcagctgaatacaagagggtgcaaagaagaagtttttcatcattgcatctgaagtaattccagcatcttgcatctcataccaatcactgaatgacatcatgaaataaatagctggcctctgaaaatcattaaaagcagatggttcgtggaaagaatctgctcccatgttatcaaagataagccaatctcccacattcagctcaggaagaagacagctttccacaatttgatcaagctcatcacaggatggaccccaaaggctgcttgtaaacagaggctcatcttccttgtatttcttgtgaacctctggaatggtatttaagtcctcagaaagcttactcgcaaaagaaccataaacaccatcattcatgta

SEQ ID NO: 2201 - DNA, 533 bp, Mus musculus
acaatgtaaagaatgagcctggcacacagttttaatctaaacactcaggggatatacaggtggattgctgtgaggtagaggccagcctgggatgtcaaggcagacacgatcctatgtaacatgtaaacatgctatggtatgtaggcatgatctgtagcactgacatgagaagctgggtgtgctgtgcatgcttcgagtcctcgtactggggaagagacaggctgacgattgaggtttctagtcttgctgaatatgtagtttccgcttcagtgggaagtcctgtcttgacttaaacaactgaagacacagggcacaggtgcctggtctcaagtatgtgccagcaacgcaggccccagcaagctccaagtctgcttgtttgtgtagtgctaacaacatctcaggaaaatgtccagacacagacatgtattttgcacagcttttaataattttcaggagtcctaatcttggcttcaaaaactttgcatttgacttggttcagctatgtagcctagggcgccatggaactgtggcaa

SEQ ID NO: 2202 - DNA, 681 bp, Mus musculus
tttttttttttttacaatgtacagaatgagcctggcacacagttttaatctaaacactcaggagatatacaggtggattgctgtgaggtagaggccagcctgggatgtcaaggcaaacacgatcctatgtaacatgtaaacatgttatgctatgtaggcatgatctgtagcactgacatgagaagctgggtgtgctgtgcatgcttccagtcctcgtactggggaagagacaggctgacgattgaggtttctagtcttgctgaatatgtagtttccgcttcagtgggaggtcctgtcttgtcttaaacaactgaagacacagggcacaggtgcctggtctcaagtatgtgccagcaacgcaggccccagcaagctccaagtctgcttgtttgtgtagtgctaacaacatctcaggaaaatgttcagagacagacatttgttttgccagtcttttaataattttcaggagtcctaatcttgtctttaaaaactttgcatttgacttggttttgctatgtagcctagggtgtcttggaactgtggcaaaggattctttttgttatttagttaataattagaatattgagtactcttttcaaaactgaaaattcccactggcatgatttgggaattcaaggaatggccaatcagcttccacagagctggtagtgatggtatgca

SEQ ID NO: 2203 - DNA, 436 bp, Mus musculus
ggcgcatatatattatttatataaatatttctctatgtacaaggaataagagtgtctttcatggaggaagggaggctgggggccgcaagcgatcaatgctgttggagttgtccaattcagtgctgtcacagtctgagtcttcaggattggggccctggccatcctggtgttgcatgggcaaggagctggcttcacgttcagggaccacctctgaagtaggtaggtccagtggaatttctgagccctgtgagcacatgtcatcagatcgttcatctggtcgctcatcagtgttggtactgccaacttctggtgtgccacttggggaaggctcactagctgtaccttcctccacatctgatgggttctctgagctgaatgtagatagtgactgacgcatgttcgggccctgaggcacctttgacttgggggtagctct

SEQ ID NO: 2204 - DNA, 553 bp, Mus musculus
tttttttttttttggcgcatatatattatttatataaatatttctctatgtacaaggaataagagtgtctttcatggaggaagggaggctgggggccgcaaggcatcaatgctgttggagttgtccaattcagtgctgtcacagtctgagtcttcaggattggggccctggccatcctggtgttgcatgggcaaggagctggcttcacgttcagggaccacctctgaagtaggtaggtccagtggaatttctgagccctgtgagcacatgtcatcagatcgttcatctggtcgctcatcagtgttggtactgccaacttctggtgtgccacttggggaaggctcactagctgtaccttcctccacatctgatgggttctctgagctgaatgtagatagtgactgacgcatgttcgggccctgaggccacctttgacttgggggtagctctacttcactgtctacctctccttcttcttcttcagatgagataccacgtttctgacttcgagtcacagcagccctgtacagcagcgcagcgggggtcaagtgct

SEQ ID NO: 2205 - DNA, 819 bp, Mus musculus
ccatatcctttgacttggcccacactttaataatctattgctattcgttacttccccatttggtatctgtgacaagagcaatttaaagagaacattgtaaataatcagagctgacctttaaaaagctcacctgatccgtaaaagtggccagtgttccttatggtcactggctgtcagcacatacttccttgttgatctgactgaaaactccagaagcactcagctgcttctaccttcctggttcttgtacctccagagtgtgctcctggtcctactgttgatgttcggcatggtagagacagcatcctgttcatccagttccagtgcagactcgggggctcatcatacagagcaggtctgttctgactgctgcagccgtctcagattggctttcaggtaagtacaggggaaggactgagggcctcccactggctcagcacaagctaggctttagtctttgatggggatgggagcttcactgcttctttgtcctgaccattcaatctcacaggatgcggtacacagggctaatgggaacactgctcaccttggtcaacctgctgcagctggctgggactctgagaattgcagccttcaacattcggacttttggggagactaagatgtccaatgctaccctctctgtatactttgtgaaagtaagtccactgtggccagagtctgagagcaggcgtgctatcagggaagctagagaccacagtgaacctgaggccttaccatagctgggtggatgtcagcccagattacggtccacaccgtccatggctggcaggagagctgtgtggaagggatagtcga

SEQ ID NO: 2206 - DNA, 636 bp, Mus musculus
ttccacacagctctcctgccagccatggacggtgtggaccgtaatctgggctgacatccacccagctatggtaaggcctcaggttcactgtggtctctagcttccctgatagcacgcctgctctcagactcttgtcacagtggacttactttcacaaagtatacagagagggtagcattggacatcttagtctccccaaaagtccgaatgttgaaggctgcaattctcagagtcccagccagctgcagcaggttgaccaaggtgagcagtgttcccattagccctgtgtaccgcatcctgtgagattgaatggtcaggacaaagaagcagtgaagctcccatccccatcaaagactaaagcctagcttgtgctgagccagtgggaggccctcagtccttcccctgtacttacctgaaagccaatctgagacggctgcagcagtcagaacagacctgctctgtatgatgagcccccgagtctgcactggaactggatgaacaggatgctgtctctaccatgccgaacatcaacagtaggaccaggagcacactctggaggtacaagaaccaggaaggtagaagcagctgagtgcttctggagttttcagtcagatcaacaaggaagtatgtgctgac

SEQ ID NO: 2207 - DNA, 852 bp, Mus musculus
  misc_feature (1)..(852): n is g, c, a or t
aaattatttgaacagaacgatcagccacgagctctaagaagcacatcatcgttggtgttcagggtagaacagtgtattcttagtatccagaaaggcacagcgcgcacagttcaaacaacacattggagattgccaccagagctttggcaaggtttacatgacatctgttaacaagttctgctttagccattccataagctgtaaggcctggccatacgcattaggacatacacacatgcagtatctaaagttggttttatcagattgtggcaaaaatcaatgtttgaataatattaatttggattagaaagttgacatggaaagaactgctttttaaagaaatctttggtttgggatatagctcggtcggcagaacatttgcctaacatgcacaacgcccgggacccatcccaagcatcatataactgatcctgtgacacatccatccaagcattactaacctgtaaatatcaatgtgcaatcacactcttggagacctcttaatgctaggagttggcaacagtgtgagaactgccttaaataggttgtgtatatgaatacaagagaaccgaaagcccagtgtcatcatccttggccacatagcatgtctgagaccagaaaagaatatgtgaggctctgtctcagaaaagaagaaaatcttagctaagcatggaacagccaggcaggaggaccaagggccatgctcaattacacagcaaatttgagttggaagccagcctgggctacttaagaccctgtttttaaaattanaaaacaaacaaaaaaaaggcatagaaagaagtctttggtgggttagtaagtgttacatgagtcatatttcaacattaaggg

SEQ ID NO: 2208 - DNA, 522 bp, Mus musculus
tgagcccttcctgcctgatctacaagtgcttctggaccaggacctaaggacattatgtagcccacagggacagagatgggtagtgcaatgtgaaaaatacttcaccaacccttttaagtgtctttaattcttcattgtctaactcttttctcgccttttggttgaacgattaggtatcatttttgagtggttccccctctcctatttttaaactagtgttcaacagttattaaaaatcatgcaaaaaaattcatgcaacagagggacttgttaatttacaaatcatgccttcagacctctgagattcatttaggtgacttaaacatcttcattggtttgataattttaaaataaatcttttaagaaacttttaaaacatttcttccccttaatgttgaaatatgactcatgtaacaacttactaaaccaccaaagacttctttctatgccttttttttgtttgttttttaattttaaaaacagggtcttaagtagcccaggctggcttccaactcaaatttg

SEQ ID NO: 2209 - DNA, 769 bp, Mus musculus
ccacatagctcctttactcacagccctttggtttttcagacaaaatttaagggccctcataaagccataagtattgattacccctcaatgcacctgaaagcagtgttcaatcccttacaaaggctgtgttccagagaccctgtccctatacacttgtcttacggctcagtggtaaggtggctgtagacacacaatagggtaagtggcaacaggaaacggggaagcccaggcacatgggtgcagggagggcagggacaccacttccaccttcctttgtcttttccttttaaaaaaaaaaaaaaaaaaaggcggtgtgattggttggaaagggtagagaacaaaccccagaacagtatgtcagctccagaggtgacggagcgaacagtccccagaaaggtgagaaggggaaaggtcagggtaatgcctgcagcatcaagttcctcaggagtttctgtcggcccagctcatagtcctcctcatccacgttcaccagcagcttgatggcttcatggcccacagcttgcttgagagagtctgtgatgaagacacctttcagtgcctctaataatgagccattaatgcagtctcgccagaatgcgtcgaggtaggtgagctcagagaacttgatgtcacagatgatggagcccaggtcccgggacttgaggatagtgttggcctggttaaagcgctcaaactggcgctcaagtgggtcctgcttattggagaagacattgccttgcagagccgtctcatgctggcggatagtcga

SEQ ID NO: 2210 - DNA, 525 bp, Mus musculus
ccagcatgagacggctctgcaaggcaatgtcttctccaataagcaggacccacttgagcgccagtttgagcgctttaaccaggccaacactatcctcaagtcccgggacctgggctccatcatctgtgacatttagttctctgagctcacctacctcgacgcattctggcgagactgcattaatggctcattattagaggcactgaaaggtgtcttcatcacagactctctcaagcaagctgtgggccatgaagccatcaagctgctggtgaacgtggatgaggaggactatgagctgggccgacagaaactcctgaggaacttgatgctgcaggcattaccctgacctttccccttctcacctttctggggactgttcgctccgtcacctctggagctgacatactgttctggggtttgttctctaccctttccaaccaatcacaccgcctttttttttttttttttttaaaaggaaaagacaaaggaaggtggaagtggtgtccctgccctccctgcacccat

SEQ ID NO: 2211 - DNA, 795 bp, Mus musculus
ggtttttatttttattaaaaacctcctgattttctccactgtatttgtgtgctagtctccttctttcccgtgtaggcctcctgggaggagccggaaagcagtctgttcaagtggctccctgattaaagaaagtcacctgtccaggcagggtcctgtccacctcagggtccttcacaggctggctcgcttgctctcaatgatccccctccagttgtcactccaggaaagcagccgtctcctggtggggggcagggccaggtgctgattgtggcagcaggtgaacaagatgtgctcccagcttggggtctcctctaggccttgaatgttgtctttgtcatcaatgagcaggtctcccatgaccaccgtcttgtccctagtcaagataatccgctccacaaactctggccccaggttctgctccacccagcggtacttctcgcccacacagtggtcgtacttcagcagtggggtggtgcagatgaagacctcggtgtctttcatgtcgttcatctctcgcaaagcgtccaaggccccagggatgggctccaagtttaggaaaaagcctggagattcatacacactggccactttttccgccaggtccggcctcagagctccgtactgctcgttggcgaggaagccccggcgctgttccagggcacgtgcggttcctcgggaaagcggcggcgaaaaccctgcaggaggccggactcgaaatcagctagcacgccgtccatgtccaccagcacgcgcacgggccgcttcaccgccatttgcacgcccggggatagtcga

SEQ ID NO: 2212 - DNA, 595 bp, Mus musculus
  misc_feature (1)..(595): n is g, c, a or t
cgggcgtggcaatggcggtgaagcggcccgtgcgcgtgctggtggacatggacggcgtgctagctgatttcgagtccggcctcctgcagggttttcgccgccgctttcccgaggaaccgcacgtgccgttgtatcagcgccggggcttcctcgccaacgagcagtacggagctctgaggccggacctggcggaaaaagtggccagtgtgtatgaatctccaggctttttcctaaacttggagcccatccctggggccttggacgctttgcgagagatgaacgacatgaaagacaccgaggtcttcatctgcaccaccccactgctgaagtacgaccactgtgtgggcgagaagtaccgctgggtggagcagaacctggggccagagtttgtggagcggattatcttgactagggacaagacggtggtcatgggagacctgctcattgatgacaaagacaacattcaaggcctagaggagaccccaagctgggagcacatcttgttcacctgctgccacaatcagcacctggccctgccncccaccaggagacggctgctttcctggagtgacaactggagggggatcattgagag

SEQ ID NO: 2213 - DNA, 786 bp, Mus musculus
gtagaggagagctttatttccaggaaagagtatattctctggagatgggaatttttttaaaaacatcaaggtagatctaatatgttcaacaaagtgggggggctcggccagaggagacgtggaaaggctctctaggatttgcttgtcatcttgctgcaaccagaaatccacttgtgggaatggcgtccaggaacacgggcctattcggagttgttctgtctttgcatcataaatgctaatcattgggcctcctgctaaagctcttgcagcacgcagttgctcctctggaccacgatcttgaaaggaagctctgtaaatctctgcagttttaatgttgacagcgatgccataaatgattggaaagtgattttcattttcttcacggtcatttaactctgttacacataatgtcactaagtgaatgtcatcatcctgtttgtcaaattcactgagaagctgatgagtaagtttctgtgacagctgcctgtcatcactgaagcctcccacaagatgtacttccagccttccacactcagcatgttcagagaaggattttatggagctcattatcaaggggacttcagctttggtgtcagatccatcacaatgtgtcaggcaggttgccccatttcctgtatgtctcaggactacaatgtgacaagtggtagcatcatcagaacccagaatggagatggagcctccagaggcgggtgcgccggaccagctccacagcggaccgtggcagacggacgcgctgcccatccaccagcagtggcggatagtcga

SEQ ID NO: 2214 - DNA, 553 bp, Mus musculus
  misc_feature (1)..(553): n is g, c, a or t
ccactgctggtggatgggcagcgcgtccgtctgccacggtccgctgtggagctggtccgggcgcacccgcctctggaggctccatctccattctgggttctgatgatgctaccacttgtcacattgtatnctcgttacatacaggaaatggggcaacctgcctgacacattgtgatggatctgacaccaaagctgaagtccccttgataatgagctccataaaatccttctctgaacatgctgagtgtggaaggctggaagtacatcttgtgggaggcttcagtgatgacaggcagctgtcacagaaacttactcatcagcttctcagtgaatttgacaaacaggatgatgacattcacttagtgacattatgtgtaacagagttaaatgaccgtgaagaaaatgaaaatcactttccaatcatttatggcatcgctgtcaacattaaaactgcagagatttacagagcttcctttcaagatcgtggtccagaggagcaactgcgtgctgcaagagctttagcaggaggcccaatgattagcatttatgatgc

SEQ ID NO: 2215 - DNA, 532 bp, Mus musculus
ggtattactcagactctagggccatggtcaatacatttgacaccattttattgctaaaaaaaaatgtgttctggggtgacatttattcttggctttccctcgagactcatgggagtgttttctgtcatggagggactactgggaaggtcacagcaagtgcacacacaccacagatagggacattaagatagtattgcatcccaatacttttgcctttaaaagggtagagaactctacaggacaacccatttcctgagagggtaggccagatggctctgggtgactgagaatgtcattccttgaatgggggacagaacggagagggggtgggatttgtggacacattcacatataagcatatgcaccccagcaacaaggctcctaatagcctctccaggaaggagacaccgacccctagattcctggagtgtgtaaacagcccacccctagagccctcatccagtccatttctccagctcgcaagacccggcttccaacgtgaagtcaccagggcgtagaaagggatagtcga

SEQ ID NO: 2216 - DNA, 549 bp, Mus musculus
tttctacgccctggtgacttcacgttggaagccgggtcttgcgagctggagaaatggactggatgagggctctaggggtgggctgtttacacactccaggaatctaggggtcggtgtctccttcctggagaggtactaggagccttgttgctggggtgcatatgcttatatgtgaatgtgtccacaaatcccaccccctctccgttctgtcccccattcaaggaatgacattctcagtcacccagagccatctggcctaccctctcaggaaatgggttgtcctgtagagttctctacccttttaaaggcaaaagtattgggatgcaatactatcttaatgtccctatctgtggtgtgtgtgcacttgctgtgaccttcccagtagtccctccatgacagaaaacactcccatgagtctcgagggaaagccaagaataaatgtcaccccagaacacatttttttttagcaataaaatggtgtcaaatgtattgaccatggccctagagtctgagtaataccaaaaaaaaaaaaaagggcggccgcattga

SEQ ID NO: 2217 - DNA, 703 bp, Mus musculus
gaccatcaaataatttactgtgatgcaacgtgtgccctcacaggcaggcgcccggaggaactgagaggggtggaggacttgggtgccagtggaacagggacagttcatgacagtctgttcaaattgtccatgcgaaggtcttggtcacatctgtccaccatccctggactggcctggctccagcaccgtttccttccttcccgcctctttccttccttccgtcggcacctcctccctgcatccggcacctccatgtcctgagcctgtgccgggacgggcacaaaggacatgactgactgcaggcgggggggattggcagaattgggggagcaaggacatcagagtggatatgaagttcatctggctagctgaggtcactgccccagacgtctcgctggtccctgcctcacctggtgtcaggacagcacacatttgcagctcatgcagccaggaccactctcatcgggtgggttcagtttccgcaatttatgctgccgaatctcacggactagtgtatagaaggcatcctccacgccctgccgggtcttggctgatgtttcaatgtaggggatgccatagctgcgagcaaggtcctgggcctgccgagactcaacagtgcgagcagccaggtcacacttgttgcccaccagcaccattggcacatcatctgaatctttcgcccgcttgatctgcggatagtcga

SEQ ID NO: 2218 - DNA, 720 bp, Mus musculus
  misc_feature (1)..(720): n is g, c, a or t
cagatcaagcgggcgaaagattcagatgatgtgccaatggtgctggtgggcaacaagtgtgacctggctgctcgcactgttgagtctcggcaggcccaggaccttgctcgcagctatggcatcccctacattgtaacatcagccaagacccggcagggcgtggaggatgccttctatacactagtccgtgagattcggcagcataaattgcggaaactgaacccacccgatgagagtggtcctggctgcatgagctgcaaatgtgtgctgtcctgacaccaggtgaggcagggaccagcgagacgtctggggcagtgacctcagctagccagatgaacttcatatccactctgatgtccttgctcccccaattctgccaatcccccccgcctgcagtcagtcatgtcctttgtgcccgtcccggcacaggctcaggacatggaggtgccggatgcagggaggaggtgccgacggaaggaaggaaagaggcgggaaggaaggaaacggtgctggagccaggccagtccagggatggtggacagatgtgaccaagaccttcgcatggacaatttgaacagactgtcatgaactgtccctgttgccactggcacccaagttctccacccctctcagttcccttccggcgcctgcctgtgagggcacacgttgcatcacagtaaattatttgatgttcanaaaaaaaaaaaaaagggcggncgc

SEQ ID NO: 2219 - DNA, 554 bp, Mus musculus
gcaacttccttcaagtctttattattgtagcttaaaagtttatacacaaggagtgtttccaacacaacattcactgattggtcttcaccccgccccacaacccgcgctttctgcctaggactcccaagttcttccccttctccttgtcttagaactaatcccttctccaaaaagttctcgcatccctcctggggacctgcgaacctcgcagattgattccccaagccacttcctttggtctcgaagtccatcccttaccatgtccctcttccacccctttttcgacggttccctgtggaaccagagcactctccccctcttactttaggcgctgtttcgagcctctctgcaattcagagccgacccgtggtcaagcccagttagaggcggttcgtcatcagcagccagggctccagcgcacccaaagctaggcggggaaattaccctgcccaccctttccctatctcgagcccctcccccaacccagggataagaaataaacacaaaagcagcaggactccctgcgctcgacaggtgggtgccaggatagtcga

SEQ ID NO: 2220 - DNA, 574 bp, Mus musculus
ggcacccacctgtcgagcgcagggagtcctgctgcttttgtgtttatttcttatccctgggttgggggaggggctcgagatagggaaagggtgggcagggtaatttccccgcctagctttgggtgcgctgtgatcctggctgctgatgacgaaccgcctctaactgggcttgaccacgggtcggctctgaattgcagagaggctcgaaacagcgcctaaagtaagagggggagagtgctctgggttccacagggaaccgtcgaaaaaggggtggaagagggacatggtaagggatggacttcgagaccaaaggaagtggcttggggaatcaatctgcgaggttcgcaggtccccaggagggatgcgagaactttttggagaagggattagttctaagacaaggagaaggggaagaacttgggagtcctaggcagaaagcgcgggttgtggggcggggtgaagaccaatcagtgaatgttgtgttggaaacactccttgtgtataaacttttaagctacaataataaagacttgaaggaagttgcaaaaaaaaaaaaaaagggcggccgcgacca

SEQ ID NO: 2221 - DNA, 525 bp, Mus musculus
ctgagtttaagttatttatttaaggcatctcctcttacaagcagaagggatggaagatcagagtaatggtcgccatctgaggaaaggagacacgagcttagcatccaaagggttttcgtggtccacacagagtaagggtccaaaaccagtgctgtggtccctttgttgcctgggggaggccaggttctctttactcatcttcatagccggtcggaagtgggttcacatgagggttgtggaagagggtatggttaccgtctccccaggggaagggcttggtcctgatgcgcaggtgagggtaggcaacgaacgggggtctctcgtgctcttcgtgccgcgacttgaggaacacgttgagcatgctcactcccaccccgggcagcgccacgaagtaggtgagggccttccacatccgagctgaaccctcctcgccgtgggcccactcgacatgggccgcctcaacccggggagggcccggcccagcggccgagagacccgagacgctgacagcaccgggatagtcga

SEQ ID NO: 2222 - DNA, 575 bp, Mus musculus
  misc_feature (1)..(575): n is g, c, a or t
ggtgctgtcagcgtctcgggtctctcggccgctgggccgggccctccccgggttgaggcggcccatgtcgagtggcgcccacggcgaggagggttcagctcggatgtggaaggccctcacctacttcgtggcgctgtccggggtgggagtgagcatgctcaacgtgttcctcaagtcgcggcacgaagagcacgagagacccccgttcgttgcctaccctcacctgcgcatcaggaccaagcccttcccctggggagacggtaaccataccctcttccacaaccctcatgtgaacccacttccgaccggctatgaagatgagtaaagagaacctggcctcccccaggcaacaaagggaccacagcactggttttggacccttactctgtgtggaccacgaaaaccctttggatgctaagctcgtgtctcctttcctcagatggcgaccattactctgatcttccatcccttctgcttgtaagaggagatgccttaaataaataacttaaactcngaanaaaanaaaaaaataaaaaaaaaaaaaaaaggggcggccgctctantgggacccccct

SEQ ID NO: 2223 - DNA, 826 bp, Mus musculus
gcagaaaggcttgctaggggaagcagcaagtactgctgttgaacccttcacctctgggctggcctctgatgacaaggacgtttcatttactgcaggttctcttttcttgctcgcttgctttctgtgagcatcaccatttctatcagaattgggactaagtctctgggtcttttcactacttaagtctatgtcctttctttgttttttctgagaagagtgactaacaccaggactgtttttcctcttcttgtgaccattacccagagtttcaggcaactctaaacaatccaactttgatggaggctccgactttaaattatgtctcttgatttcacaggagccaggagactctgaggtcaaatcaatacaagtttcttcaacaatactttctaaaggactgtttgcccttcccatctttccttctttgttggtatcctcatctatacatattacctggcatcccataccttcaacagctaacacaggttcactaccttcatttttactctcacttgaagcatcatgtgtcaaatcaataaaagcatctatagtatcaggctgtaaagaactacatgttatctctgcatcttgatctaagttggtttgagaacattccaagtgatcaacatttaaaactgttacttccattagctcccccaagcttttggtctcagtggctgaatctttcgttagatctatgtgtgtatcaggaagatgattatcaagagagtgtgggattttctccattgaaggcaactcttgaagggtctcagaaacttttggttcccatacttgatgcaacttgaagcaatcatcaaccacttga

SEQ ID NO: 2224 - DNA, 507 bp, Mus musculus
tgtcataatggaaaagtccaatgatcatttcattgtgaaaatacggcgtgcaacaccatctacctcccctggccttaaacatggtgtggtagctgaggagtcattgacatctttgcctagaactggaaaagaagctggtgtagcaacagagaaagaacctaacctgtttcagagtacagttttaaaacctgtcaaggacttggaaaatactgataaaaatattgataagagtaaactaactcatgaagaacagaactctatagtacaaacacaggttccagatatatatgaatttcttaaagatgcctcaaataaggtggttcattgtgatcaaagtggttgatgattgcttcaagttgcatcaagtatgggaaccaaaagtttctgagaaccttcaagagttgccttcaatggagaaaatcccacactctcttgataatcatcttcctgatacacacatagatctaacgaaagattcagccactgagaccaaaagcttgggggagc

SEQ ID NO: 2225 - DNA, 547 bp, Mus musculus
cagtggtgcatgcctttaatcccaccacccaggtaacagaggtgggtggatctcttgagttgcaggtctagccagggctccagggctacacagtaagatcctgtctcaaaaaaggagaggaggaagactcaaggccagcctgggctacatggaggccaacctgggctacatggaggccagccatcaatcactgcagcttcatgccacttcgtcgccgtgagtccttccgggctatgggactgaagtttgagatctctttgtagatgtgttgtttccattcgtccacgctgagtttctcatgttctaaggcatcatcaaaaggctgctgggcctctgtctcctcctcagggtcccggaagggttcaaagaaggggtgagccagtgcctgagcagcggtcagacgcttgtccacatccagctccagcatcttgtcgagcaggtctgcagcttgcggactggcgcgtgggaagagctgtgtgaaatccttcttggggctctggggcagggactgaatataggatttggccttcagctcacggatagtcga

SEQ ID NO: 2226 - DNA, 604 bp, Mus musculus
  misc_feature (1)..(604): n is g, c, a or t
tgagctgaaggccaaatcctatattcagtccctgccccagagccccaagaaggatttcacacagctcttcccacgcgccagtccgcaagctgcagacctgctcgacaagatgctggagctggatgtggacaagcgtctgaccgctgctcaggcactggctcaccccttctttgaacccttccgggaccctgaggaggagacagaggcccagcagccttttgatgatgccttagaacatgagaaactcagcgtggacgaatggaaacaacacatctacaaagagatctcaaacttcagtcccatagcccggaaggactcacggcgacgaagtggcatgaagctgcagtgattgatggctggcctccatgtagcccaggttggcctccatgtagcccaggctggccttgagtcttcctcctctccttttttgagacaggatcttactgtgtagccctggagccctggctagacctgcaactcaagagatccacccacctctgttacctgggtggtgggattaaaggcatgcaccactganaaaaaantaaattaaanaaattaataaataattgaaaaaaaaaaaaaaggggcgggcgcaaataga

SEQ ID NO: 2227 - DNA, 748 bp, Mus musculus
cttttgttaccagttaaatataagaacaccttttacctctataacaggatggaagctgctgtgactagatacctttgagaagctttctgagcatgtgaaagagaaaacagaaagtattttctgcaattggtaaacttgctgttttcagaatgtcaacaggcaaacaaacacgtgacacggtaccttgtgaaaaccatgccaccctggccccaaactcctacagcagtggttgtcctggggccgactgcctgcaggcactgaatgctgtctgtggtattctaatccccatcccaccactctgagaagcttgtctgactaagtctgaggaaaagaatggctatgatgtggatcacattttcaatgatttttaaattgtacttaaaaaaaaggttttctagtaattgagtatataaaagtctctgatattaaatttctcttagtgaaataaaatatgctttaacaagatgatgtcaatttaagtttgaccacctggttcttttgtttttcctttctttcacattttcagaggtaactgatttatctattatgttcagtcttgcaaatgtctgtttgaaaaacaaatagttcccaagtgccccacaaaaatggtcctgattgagacaaataattggaacattaatcttttatggttttaaatgggagtatttcctgcaaaatggttactcaacaaaccactaagttacaagtggtctgactacaaatgctgagttgtttcctaagtacccat

SEQ ID NO: 2228 - DNA, 479 bp, Mus musculus
cctttgtttcagtgtttgaaggagctagctcccttacctttatctgaagtggtgaatgtagtgcatatgatatacattgtaagatacacattgtaacatgatccatactgtaaacttgtatgtaaggtgactacctttttccttcatctccagtaaactgtaaacaggactactgcatgtactctgttgggaatggaaggccagaactccataccgtggatggatgggtacttaggaaacaactcagcatttgtagtcagaccacttgtaacttagtggtttgttgagtaaccattttgcaggaaatacttccatttaaaaacataaaagattaatgttccaattatttgtatcaatcaggaccatttttgtggggcacttgggaactatttgtttttcaaacagacatttgcaagactgaacataatagataaatcagttacctctgaaaatgtgaaagaaaggaaaaaaaaaagaac

SEQ ID NO: 2229 - DNA, 728 bp, Mus musculus
  misc_feature (1)..(720): n is g, c, a or t
ccctagaacaatgggcagtgtttatctccgagtggcagggacactagaagcagtgacagtttctagtgggttgctcttcctttcttccttgacttaggatgcccaagttgcagggagatttggctccagcccacggccagagccttcagtccttttctttctccatggtattccttactctctgcatctccgcctctcttgtctatctctcaggcactgatcctttggtcttttttcctgtgtggtgaatggggaggagagagagcaaacgcaccgggctgtcttcaggtacattcactctcttggccaagatgacccttaggacactcctgtacgtgacctgtctcggccagcatggtctcaatcaacctctcacctggcctcaggttcatccctcgacatccggatgagctagaactcgatgtggatgaccctgtgctggtggaagcagaagaggatgacttttggtttcgtggcttcaacatgcgcaccggcgagcgtggagtgttccctgccttctatgcccatgcggtaccgggtcctgccaaggactgnctgggtaaggtcccacctataagaggaagcttgccaccacagacttccccctatatcaacctcagactgtgtgacttcctgtccctacctcccccagggagcaagcggacccgtgctgggtggatcgcttcgatgtgcagttcttgggctccgtggaggtaccggatagtcga

SEQ ID NO: 2230 - DNA, 739 bp, Mus musculus
gtacctccacggagcccaagaactgcacatcgaagcgatccacccagcacgggctccgcttgctccctgggggaggtagggacaggaagtcacacagtctgaggttgatatagggggaagtctgtggtggcaagcttcctcttataggtgggaccttacccagcaggtccttggcaggacccggtaccgcatgggcatagaaggcagggaacactccacgctcgccggtgcgcatgttgaagccacgaaaccaaaagtcatcctcttctgcttccaccagcacagggtcatccacatcgagttctagctcatccggatgtcgagggatgaacctgaggcccagtgagagggtgattgagaccatgctggccgagacaggtcacgtacaggagtgtcctaagggtcatcttggccaagagagtgaatgtacctgaagacagcccggtgcgtttgctctctctcctccccattcaccacacaggaaaaaagaccaaaggactcagtgcctgagagatagacaagagaggcggagatgcagagagtaaggaataccatggagaaagaaaaggactgaaggctctggccgtgggctggagccaaatctccctgcaacttgggcatcctaagtcaaggaagaaaggaagagcaacccactagaaactgtcactgcttctagtgtcccctgccactcgagataacactgcccattgttctagggaaaaaaaaaaaaaagggcggc

SEQ ID NO: 2231 - DNA, 815 bp, Mus musculus
atgtcaataagtgtttatttgttatacacagtgctaccacagctaccatcagagagcacactgcaattttcaagtagacaactgagaaagaacaagtctgcatgctgccttcacggtgcatagaaaactggtgaactaacactagctggtaggcttaggaatcactccgcagtgttaataaaggccactttagtctggaaggctacttctctgacaggctttgagcagttctacattgcaggtcttgtgaaggatgcaacaagtgaagattggaaaatgtcacaccttgttttgaagatggagagtcaagttatgcaccacttgagagagccatcttagtagcttaatgttggctttcttttatcacacattggcaatttaagaattgagaattaaaaaaaaaaagtctagggttaaacagaacacttgtccacatgatggaattacgacctaataacatttgcccagttctcacctgttgtcctgcccaaacccctcatctgatgaggtttagtgaaagcctctaacaactgtaacagacttcacatactatgtatggaaacgtgcctaagacatgggtgtgtccacaggaaaatggcagtgcttctattgcaggtaagtgtcaagttttctcttgatgttatcaaaagaatctgctcccatgtaatcggcctggccctgttcccaccgttccttcctttcttctgaggacatagaaggttgtggtgcagctggggcctccccaaaggacaggtctgacaaggctcctgagacatgttccatcattagataggagctggcatctttgacaaggc

SEQ ID NO: 2232 - DNA, 599 bp, Mus musculus
tcacttactcagtattccaaatgtgtgttcatggatgcagatactctggtcctctcaaatattgatgatctgtttgaaagagaagaattatcagcagcaccagacccagggtggcctgactgtttcaattctggagtttttgtctatcaaccctccattgaaacgtataaccagctgttgcatctggcttctgagcaaggtagttttgatggtggggaccagggcctactgaatacatattttagtggctgggcaacgacagatatcacaaaacacctgccatttgtgtataacctaagcagcatttcaatatacccctacctcccggcatttaaagcgtttggtaaaaatgccaaagttgtgcacttcctgggacgaaccaagccatggaattacacttataacccccaaacaaaaagtgtcaactgtgactcccaggacccaaccgtgcgtcacccagagtttctgaacctgtggtgggacaccttcaccaccaacgtcttacccctgctccaacaccatggccttgtcaaagatgccagctcctatctaatgatggaacatgtctcaggagccttgtcagacctgtcctttgggga

SEQ ID NO: 2233 - DNA, 713 bp, Mus musculus
gacttcaccatccaaatatgggaaatgtgttttgggtacccagttaataaaatatatccatggtccgcaatgtccttgttttatatccacaacaagcccatgattctagttgaagagaatggaatcagggtcttggtttgccatctgtgctatatgctttaacacatcctttttcggcgatgattccaagtaagcgcccgttgtgtgtaccaggcactggcgcaggcccagcttgcggaagatgtccaccacgatctccattggcgtaaggtctgtcacagtgaaggggctgaggtccaggatgttccgaagcttcagggtaggtggggtgtatggaggcattggaggcgaatgctccgtgaaataaatgatggaactgctcacaaccccgtcctgtttcttccgagcattttcaattgaaataatgagatctcttcgaagaacaaagcctacaagtctttgcgactctcgggacactaccaccggaaagccactgtacgtggtttcgctgattatggtctcgacatcctccacagtcatactgtcctgagtaaggacagtcagcaaggggtcatttctccggggcttcatcacatccattgccagagtcttatgagcaaattcttctttggcttcaagaaaggggtatccattgagacggatgtgggcatcataaatgccctctcgcccaagagcatcggccggatagtcga

SEQ ID NO: 2234 - DNA, 730 bp, Mus musculus
  misc_feature (1)..(730): n is g, c, a or t
gccgatgctcttgggcgagagggcatttatgatgcccacatccgtctcaatggatacccctttcttgaagccaaagaagaatttgctcataagactctggcaatggatgtgatgaagccccggagaaatgaccccttgctgactgtccttactcaggacagtatgactgtggaggatgtcgagaccataatcagcgaaaccacgtacagtggctttccggtggtagtgtcccgagagtcgcaaagacttgtaggctttgttcttcgaagagatctcattatttcaattgaaaatgctcggaagaaacaggacggggttgtgagcacttccatcatttatttcacggagcattcgcctccaatgcctccatacaccccacctaccctgaagcttcggaacatcctggacctcagccccttcactgtgacagaccttacgccaatggagatcgtggtggacatcttccgcaagctgggcctgcgccagtgcctggttacacacaacgggcgcttacttggaatcatcaccaaaaaggatgtgttaaagcatatagcacagatggcaaaccaagaccctgattccattctcttcaactagaatcatgggcttgttgtggatataaaacaaggacattgcggaccatggatatattntattaactgggtacccaaaacacatttcccatatttggatggtgaagtcaaaaaaaaanaaaaaaagggcggccgcn

SEQ ID NO: 2235 - DNA, 727 bp, Mus musculus
cagttcgagttcttttaatatttaaatacaaaaagtgagcgctgacttcttttttatacataagcaggtctaagagccaaactctgcagaggaaatgagtgcctgctctgcccagtccccctctggctaaagctacagccagcctcccttctctctgggattcctggtgacttctgtactcaggtataatgaattttgtcagtgccacggtgcttacatgtcctagacatttccattaaaaaaaaagtccttatggtcaggggtacttacttctttcccacaatgggcatgtaagaacttccttaggagcagtttattagagagtaggctaaccttccacatggctgtactccagcattggagtgagaacaggaagaagtaagtgagggacttcattatgtagggcacaggtgtacctggggtctctccatgagaaacagagaaagttcccactatgttcaaatagatccatgtgccaaggttaaaaaaaagaataaaaagttccaacaatcagcagttcaaacacaaatgaatttcaaagttctcccacaaggacaaataccgaaggaagaatctacatctttccaggaagtggaggtagagcccctggcattcctcctgacagccctgtgttaggccctaaaagtatctgccgttgctgcagttgctgctgttgctccatctgcaacttttctgtctcaaagacaacgggaagaaccaggatcat

SEQ ID NO: 2236 - DNA, 615 bp, Mus musculus
gaagatgtacagattttccagggcagctttgtggattgggaccacttccttcatgatcctggttcttcccgttgtctttgagacagaaaagttgcagatggagcaacagcagcaactgcagcaacggcagatacttttagggcctaacacagggctgtcaggaggaatgccaggggctctacctccacttcctggaaagatgtagattcttccttcggtatttgtccttgtgggagaactttgaaattcatttgtgtttgaactgctgattgttggaactttttattcttttttttaaccttggcacatggatctatttgaacatagtgggaactttctctgtttctcatggagagaccccaggtacacctgtgccctacataatgaagtccctcacttacttcttcctgttctcactccaatgctggagtacagccatgtggaaggttagcctactctctaataaactgctcctaaggaagttcttacatgcccattgtgggaaagaagtaagtacccctgaccataaggactttttttttaatggaaatgtctaggacatgtaagcaccgtggcactgacaaaattcattatacctgagtacagaagtcacca

SEQ ID NO: 2237 - DNA, 798 bp, Mus musculus
ccctctataattagcttcccttttctctccttgggagagttagacatatcatatcctattgtcaaatttttctgattcgtaactttgtctgccactcaattagacaacactttcaaatatggatgtttccttctacaaacttatttttcttcattgtttgggattaaagctgtgtactaagggtgtgtccttattccagccagagcaattaaagggatgtgctaagggctgagccacaccacaactagaaacaagtttttttcagtaaataacaaaatctcagagttcaaaatgcagtcaaatatcctgaaacactgtttttttttaaagaatccaaaattcccgaattgtcaccatgtttctcctttctgttttaagccatttattatgctgggtggaaattataaacagagacattttcaatggaataggcgtttttcaggtcagtgacaaggttttcaggtgacctcacctgctatttctactggagtggctttgcctttgatgtagggatataaaaacagctgagcaatcctattacctgcatcaaattgcatctctctacatagaccttaattttattttctcctttgaaattttcatttacaatcctggatgtacaatgaatcgttgggaagtcaacccaccgctgctcttccagaggtcctgagttcaattcccggcaaccacatagtggctcacaaccaccggtaatgagatctgatgccctcttctggtgtgtttgaagtcagtttcagtatcctcatatacataaaataaatctttaaaaaaaaaaaa

SEQ ID NO: 2238 - DNA, 558 bp, Mus musculus
cagcgggaagtcttccgtttgtgctaagatcgtccagcttttggggcagaatgaggtggattaccaccagaagcaggtggtgatcctgagccaggatagcttctaccgagtcctcacctcagagcagaaggccaaagccctcaagggccaattcaactttgatcacccggatgcctttgacaacgaactcatcttcaaaacactcaaagaaatcaccgaaggaaaaaccgtccagatccccgtgtacgactttgtctcccactcacggaaagaggagacggtcaccatctaccccgccgacgtggtgctcttcgaagggatcctagccttctattcccaggaggtccgagacctgttccagatgaagctttttgtggacacagatgcggatacccgtctgtctcgccgagtattgagggacatcagcgaaagagggagggaccttgagcagattttatcacagtacattacgtttgtgaagcctgcctttgaggaattctgcttgccaacaaagaaatacgccgatgtgatcattcctagaggtgccgacaatctcgt

SEQ ID NO: 2239 - DNA, 869 bp, Mus musculus
catagttacaatgtcatttatctcactcctgtggcatacattgagaatatttaaaaacactttgatagtccattgcggattatggaatgttacacatccatttctataaattaaatgttttaggaaaatccacagtttaaaaaaattatacaagaataagctagtatatcacaatcaacaaagaatgaacctcaagaattccaaataatataatgtcaggaactgcttctcttcacagtaaacactcactttacgcaaatcccatttggcttcatttaattaaaaagctatatggatagccatggtactttgaacgaaatattgaaaggagaaaactgaagaagaagaccaccaagcccaatcccacgaggcaaatgatgcgtcttttcccgacatcccctttggaagttgctgcttcatttagaagaaccatccccatggtgatagcagcattcagtactagaatgatgtgtgactctgccacaaactgagcctggctgcttccatgaatgtagctcacttgtccattgtgtgggttcttatgagcatatggaggtccacggatatgattccacatctggccagacgtcatagcaaagactatacacagagataccatggcccaaccagtcttgttatagataaactccaagttgttcctccttagataaagcaagccaccaaccagtgacactaacagggccaaagcaatggtgcctgagtagttgggtggccggaaaactcgaatatgaacatccgtcctgtcggcaatccattttgctagctgctcagctgcaaatccaattcgttgaaggtcaaaagtatcagctctcttgggtctgccttttgaaggaaatgcatgaatgtgg

SEQ ID NO: 2240 - DNA, 626 bp, Mus musculus
gatggcagaagacgtgtgattccttgtcacagcaaaccttttggctgaaaaagtggagcagctgatggaatggagttccaggcgctcgatcttcagaatgaacggcgacaagttccggaagtttgtaaaagccccacctcggaactactccatgatcgtcatgttcactgctctgcagcctcagcggcagtgttctgtgtgcaggcaggctaacgaagaatatcaaatcctggctaattcctggcgttattcatctgctttttgcaacaaactgttttttggaatggtggactatgatgaagggacagatgtttttcaacagctcaacatgaactccgctcccacattcatgcattttccttcaaaaggcagacccaagagagctgatacttttgaccttcaacgaattggatttgcagctgagcagctagcaaaatggattgccgacaggacggatgttcatattcgagttttccggccacccaactactcaggcaccattgctttggccctgttagtgtcactggttggtggcttgctttatctaaggaggaacaacttggagtttatctataacaagactggttgggccatggtatctctgtgtatagtctttgctatgacgt

SEQ ID NO: 2241 - DNA, 444 bp, Mus musculus
gtacaataaagtttaatcacaattataaaaatgtggtgttgggtttcactattaacattatgtacaatccagcccaacaagaagggcctgccccccaccatcctggcccactgagccagagccctgagacaccagggtgggagggtgacccacagggtctggcaggaacagatgaggcagggttccaggcacagagttcccaggactaggggccaaaggcccccaagggggagaacatggccactgccccagagacccctaaactggggcggggtgcacatagggcagaaggggaagtccccattaacatgaagcaaagggctatgcagcccccaagaatagcatctatacaggctggtaccccaggtttccacaggaaacagctgctggcagctacaaaacatttacagcttcttcttcgcaaagaaaaaaaaggatagtcga

SEQ ID NO: 2242 - DNA, 476 bp, Mus musculus
tttttttctttgcgaagaagaagctgtaaatgttttgtagctgccagcagctgtttcctgtggaaacctggggtaccagcctgtatagatgctattcttgggggctgcatagccctttgcttcatgttaatggggacttccccttctgccctatgtgcaccccgccccagtttaggggtctctggggcagtggccatgttctccccctgggggggcctttggcccctagtcctgggaactctgtgcctggaaccctgcctcatctgttcctgccagaccctgtgggtcaccctcccaccctggtgtctcagggctctggctcagtgggccaggatggtggggggcaggcccttcttgttgggctggattgtacataatgttaatagtgaaacccaacaccacatttttataattgtgattaaactttattgtacaaaaaaaaaaaaaaaaaaaaaaaaaaaaaaaggggcggccgc

SEQ ID NO: 2243 - DNA, 713 bp, Mus musculus
gaggtgaaaacattgctttaacttccttattaatcaaatacattccaaaggaaatcgtgtaatatgtatgttgaaagcacaggcaaatcttaacacaatagcacaggaatcagtaatactgaaaatgactcttccgacaggatgcttaacaaacttaaaacttctgagttattgaaccaaaggattcctttctaataactgtgtcaatagtgaaactgggtctgtcccagaaatactctagtgatttcattgtaatactttttactgttgttgacagttttaaataaatcttgatatacttaaaataacttttgaaagtggaaaagtatacaaagttttagataaaaagattaacagatgtgatttaaataaaatttcccctttctttttttatcaataatctaatcattacttttaagcagatagactgaattttaaaacccagtcccaaaatgaaaatttcagtttgaaattttaatcagtcctaactggaaaggattgctatgtatctggacaccttttacaagaagtttatgtattaaagcagaggccggttcctatacctttattcaattgtatatcccattgagacaaatataaaaaatagaagactgtcacttttgcttttgcaattgtgatattttttttcctcactgcagtcttctataacttttacagagttcatggtccctaatatctccccaccctccatt

SEQ ID NO: 2244 - DNA, 604 bp, Mus musculus
  misc_feature (1)..(604): n is g, c, a or t
tctggtccgcagagatcaacagtctgatctccagggtggatttctgcccggttctgcaagtgttctttccgttcagcattcagctgtacccgaatgagtttccgggtagtgaccctagagattgccccagagacctaaagaagaatgcagctctgaagttggggtgcatcaatgccgaataccctgactccttcggccattacagagaggccaagttctcacaaaccaaacaccattggtggtggaagctgcattttgtatgggaaagagtcaaagttcttcaagattacactggccttatactcttcctggaagaggaccactacttagccccagacttttaccatgtcttcaaaaagatgtggaaactgaagcagcaggagtgtcctgggtgtgacgtcctctctctagggacctacaccaccattcggagtttctatggcattgctgacaaagtagatgtgaaaacttggaaatcgacagagcacaacatggggctagccttgacccgagatgcatatcagaagcttatcgaatgcacggacactntctgtacttacgatgattataactgggactggactcttcagtatttgactctagc

SEQ ID NO: 2245 - DNA, 459 bp, Mus musculus
cacacacacacacacacacacacacacacaccacttaacactctggatggacttagcctagaggagtgtttctttcgaagaccaatggtcagggctatacttatctgagagcagccaatgtgtctgccaagaaaaggtgattgtagactttctcccaggtgttagggaaaggtgaagctgggtcccccaccctagtcctgacagtgttcctcttgtatgttcccatctgctcctcccatcccccaagttgttaccccagctgaccctctggcttctgggttcattttctgtagtcacacttccccacagtaccagagctgagcctgtaagccccagcacttggaaggtggaggcaggaggatgagggggcattcaaggccagatttggctacacagtgagttggaaaccaatctgagctccatatacccagtcatctctctctttctctctctctctct

SEQ ID NO: 2246 - DNA, 520 bp, Mus musculus
  misc_feature (1)..(520): n is g, c, a or t
taggtcttagcctgctttggccgataaacaagtccactctcctttgtcagccttttcccctgattgcttcagaaatacagagaaaccaaagtagtgggctttggacctgagtatcagttaattggcttgctcnttcgggtagaggacaaggtttactggtaagggtggcctcagcaaatgtgtttgttctggagggagcatgtaggaatgtagctgtgttctgagtgacaaggagctgtggtaggatggtaggctctgggcaagtatagggaaggttctggtagggcgtgtgcgtgtgtttgtgtgtgtgtgtgtgtgtgtgtgtgtgagagagagagagagagagagagagagagagagagagagagagagagagagagagaaagagagagatgactgggtatatggagctcagattggtttccaactcactgtgtagccaaatctggccttgaatgccccctcatcctcctgcctccaccttccaagtgctggggcttacaggctcagctctggtact

SEQ ID NO: 2247 - DNA, 617 bp, Mus musculus
cagtgttcaagtgtttattaactccctgggtagggaaagagggaaagaggatgaaggagaggagagcccagctaacctgggcaggtaatcacagagtgctgtttctgaagatacagagataccaccctcaaatgccccatgggccacctccccatgtgactccagccttcagttcacagtgttgtcttttctggtcacggctgggcccaggtcctgcttgagaggctggaagttgaagaggatggggttctcaggcatcaggatgaggctgaacttggtccccacatcacggagattttgaacttcaattctgaagttctccagcagattgataaggaggatggtcatctccagctccgcaatccgccggcccagacactgccgaacaccccagccaaagcccaagtaccggaagtgggtggtattttggcttttttccagccaacgagttgggtcaaacttgtttggattgggaaagaagcccggatctcgacccatggcaaagctagccacctgtaccaaagtcttggctggaatcttgtaattacgaagcaccaggtcattcacagtgtacctctgcaaggtcacggagatggggtggagtctcggatagtcga

SEQ ID NO: 2248 - DNA, 571 bp, Mus musculus
agactccaccccatctccgtgaccttgcagaggtacactgtgaatgacctggtgcttcgtaattacaagattccagccaagactttggtacaggtggctagctttgccatgggtcgagatccgggcttttttcccaatccaaacaagtttgacccaactcgttggctggaaaaaagccaaaataccacccacttccggtacttgggctttggctggggtgttcggcagtgtctgggccggcggattgcggagctggagatgaccatcctccttatcaatctgctggagaacttcagaattgaagttcaaaatctccgtgatgtggggaccaagttcagcctcatcctgatgcctgagaaccccatcctcttcaacttccagcctctcaagcaggacctgggcccagccgtgaccagaaaagacaacactgtgaactgaaggctggagtcacatggggaggtggcccatggggcatttgagggtggtatctctgtatcttcagaaacagcactctgtgattacctgcccaggttagctgggctctcctctccttcatcctctttccctcttt

SEQ ID NO: 2249 - DNA, 807 bp, Mus musculus
catgtcaaactgctttattacatcttaaataacagtacagtttaatatagtacctatcttgcatccagcctccttgcagtacactgactttaaaattaaatacaaaaggtgaaaagggtacagggtgcagagagctctacagagttgtttggtaggaagagaaggggcttcgctgtattctctttgccatgtccaggcctaccgcacagtcacagcacagttttgtacaggacactgcagaaaacagaatggcgaacactactgctatgagggggtgcaggatatgggggaggggagggcccacagaacactgctgtccaaacgctgctgctgaacatggctttgagatgataaccacgaagatctgcatggtgtaaaaatggtcgcctcagatgcaaaaggctgttcttccagggaggaaggcttccaggaagtggcaaagaggcagcagagcagctttcccctcccttccagaatccaacagcaatcattcccaacaggactgttttgttttgtaaagaaaacagtgacttatcccactactcaagtgtgtaaagcgcttgctgcttccgatatgtgtgcagaatagcaacagtaatggacaaagccgccacggttacaacttgaagaggttatttcttaaaataaaaagaacatctaaggactgagtcctatatgcactttagggcatttctacagcatgcgattctaagagtaaccccacccaatatggcaaacaatcagattgtgtaaaatttaacttagagagtctgagatcattattttcagaacattgattggatagtc

SEQ ID NO: 2250 - DNA, 569 bp, Mus musculus
atcaatgttttgaaaataatgatctcagactttctaagttaaattttaaacaatctgattgtttgccatattgggtggggttactcttagaatcgcatgctgtagaaatgccctaaagtgcatataggactcagtccttagatgttctttttattttaagaaataacctcttcaagttgtaaccgtggcggctttgtccattactgttgctattctgcacacatatcggaagcagcaagcgctttacacacttgagtagtgggataagtcactgttttctttacaaaacaaaacagtcctgttgggaatgattgctgttggattctggaagggaggggaaagctgctctgctgcctctttgccacttcctggaagccttcctccctggaagaacagccttttgcatctgaggcgaccatttttacaccatgcagatcttcgtggttatcatctcaaagccatgttcagcagcagcgtttggacagcagtgttctgtgggccctcccctcccccatatcctgcaccccctcatagcagtagtggcttcgccattctgttttctgcagtgt

SEQ ID NO: 2251 - DNA, 719 bp, Mus musculus
ctgtatattttttattatgtaaaaaagagctttccaaaagctgtatttggcatgagcgaatgccactgctaatgctgccagtggccaggcacaggtgcgtgaggccctgaggagtgggaagaaggaagaggtaacaggcagatcaggaaatagccagctcaggtccctgccctgggagcccgcaggataaaggccgtgcagaaaggagtaacatgtgatcctctttggtcaagcaaagacccatatacgggcccagaaggcaaaagggcacaggctcagccctggagccgcgctgtggaggctcatcacactggggcaagaggcgaggcgagaagacggagcagtgccaggctgtcagccctcagctcctaggaaccgcccttatctctgtcatccatcaggtcataccactgggctgcaccctgggaaaggtctatctctgctagatccagctgcaccttccccagaagctcacgctctcgtgacatgaaggaggagtttgacttcacagagacatcgagcttccgcctgagagtcccatccaggggcagatcccactcaaaccgctcattgaactcaggattgagggtcctcttcttctgcggggtcttcctcttggtgcttcggttcttgtctgggagcagcaacactgacacataggggtctgggagatcacgtccattttgtcgaagggcccggcagctgtgaataatgctgat

SEQ ID NO: 2252 - DNA, 556 bp, Mus musculus
ggagagacttcccataaaaccaagactgtctcccaatcttcggcccctgtctgggaggagagtgcctcttttctcatcaggaagccacacgctgagagcctggagctgcaggttcggggtgaagggacctttaccctgggctctgtatcccttcctctctctgagctcctccaggaggaccagctctgcctggaccactggtttgcactcagtggtcagggccaggtgctgatgagagcgcagcttgggatcctggtatctcagcactcgggagtggaagcccacagccacagctacagccacagtcacagctcctcctcgctcaatgacgaacctgaggccttagggggacccactcaccctgcctccccggtcctagaggtcaggcatcgcctaacacatggtgacagtccctctgaggctcccgttgggcccctgggccaggtgaagctgacagtgtggtaccacagcgacgaacaaaagctgatcagcattattcacagctgccgggcccttcgacaaaatggacgtgatctcccagacccctatgtgtcag

SEQ ID NO: 2253 - DNA, 406 bp, Mus musculus
gaggttgtgactagcatctttattggctggatggggtctgatgaaggttgagggcaggggctttgaatgtcttcagggcttgctcctggcttcgcacatatcaggtaactttcctgggcagaggattaatgatcccgctctctatatactcaaaaactgtgtatgggtcctggtctccgttgacaatgatggctcgatcgtagtactgctccagatccccagagttcctgtagaacaggtccgtttgaagcttgatgtactcctctgaatccttggggttctgcaggaggcggacctggacctctatggtgggagggggcttgtacatgaggtggaacctttctcctgtgacagggtctgtccttctcagcgtcaccgctccagaatggaatccagggatagtcga

SEQ ID NO: 2254 - DNA, 451 bp, Mus musculus
  misc_feature (1)..(451): n is g, c, a or t
tggattccattctggagcggctgacgctgagaaggacagaccctgtcacaggagaaaggttccacctcatgtacaagccccctcccaccatagaggtccaggtccgcctcctgcagaaccccaaggattcatatgagtacatcaagcttcaaacggacctgttctacaggaactctggggatctggagcagtactacgatcgagccatcattgtcaacggagaccaggacccatacacagtttttgagtatatagagagcgggatcattaatcctctgcccaggaaagttacctgatatgtgcgaagccaggagcaagccctgaagacattcaaagcccctgccctcaaccttcatcagaccccatccagccaataaagatgctagtcacaacctcnnanaaaaaaaaaaaaaaaaaaaaaaaaaaaaaaaaaaaaaaaaggggcggccgc

SEQ ID NO: 2255 - DNA, 738 bp, Mus musculus
atgaggaaattcgatctggaaacattattgggaaaaataacctacagaaactagatagtctctaattttgttgttgttttctcacgtacaaatctctgaattaacaatgatttataaagattgtcactcagggttaacaagtggcttgcctaggacatggaacagccacagacttccaaagtgacctcagctacaccgaatacatcacgtgtaaaaatcactatagagatgttggcatgccacactgtttcacagttttcaaacaaggtagaacatagcacaatgttcacagatgctggtctagttcatgtggtttctttgtatcttcctgaaagcagggagaattctataaggatggaaaaaaaaagagggggaaaaaagaggcatatagggactatggtttcacttctgaaaaaaaaaacagtctatggctgacttggggaggtgtatggagtgttgatgctctgaacctcaatcttttaaattgaggttctactttagactggatcattgccaaactggaaacaaagtttccttagtatttataatttggatatttagtcttagacctttcgtgtcttcccgattcattgctgagacctctggggaagagaagtagaaatggaatctggtggttgcacaggtaacctttccaatgactgataaccagtgtttactgagtgtgtactggaacatctatgctatgcctaccagtgcttttgaaaccttacagtgggg

SEQ ID NO: 2256 - DNA, 561 bp, Mus musculus
agcaagccatcacgcaggtggtcatctccaggatcctcatggcagccccgggcatggccatccctccgtttatcatgaacaccttggaaaagaaagcctttttaaagaggttcccgtggatgagtgcgcttatccaagtcacgttggttggcttttgtttggtattcgccacccccctgtgctgtgctctgtttcctcagaagagttccatgtctgtgacaagcttggaggatgagttgcaagccagcatccaaaggactcatcctgaaatacggcgtgtgtactttaacaagggcctgtgaagccaagatcaagtgctggaggccggagccatctgtgagcctccctaagccacagcagtgaggagatttgtgtgctggggcactcaaaagcctctacaagatcttcgttaagagtcaagctgccggtcaggagtctgacatttgaatcgtgttgtgatttacaaaaaaaaaaaaaaaacccttctggtagattttaatgatgccatttttccaaagcccccactgtaaggtttcaaaagcactggtaggcatagcatag

SEQ ID NO: 2257 - DNA, 615 bp, Mus musculus
gcatgttaaaaaacatgtttattttacagtatgtacaatcaggaacgtatttaaaaccattatcagttaaaataaatgaagcataaatcacaatttagcttgttcttagtgtatatatactcacatcaaaatataaagaacatatgaacatataccaaagagagtcagaggtgtgcactttgctacaacttggtatctatcttgataagacagatacactccattggaaaaaaccaatcaacaatgattttaaccaaactaacttcttgtgatctgtagtaaccattataatgtttgtatgaggtagtaactaaattattttggccatgtattaatactcaaaatctaaagaaatatggaagtgataaactaatgccaacagaagtaaaagcccacgagaaacctgatcagctcactctggaatgtgacagctcttcagtgtgactgtggaatgtctagtgcggactcctcagcaatgcgagttgctcttatgcgcactgtaaccctggcgacagctgcagtgttctaccgtggtaccgccattccatgatttaagtttttgcgaaggtgtatcctaagcacagacaagcttatcttacacggatagtcgacccg

SEQ ID NO: 2258 - DNA, 565 bp, Mus musculus
tgtaagataagcttgtctgtgcttaggatacaccttcgcaaaaacttaaatcatggaatggcggtaccacggtagaacactgcagctgtcgccagggttacagtgcgcataagagcaactcgcattgctgtttagtccgcactagacattccacagtcacactgaagagctgtcacattccagagtgagctgatcaggtttctcgtgggcttttacttctgttggcattagtttatcacttccatatttctttagattttgagtattaatacatggccaaaataatttagttactacctcatacaaacattataatggttactacagatcacaagaagttagtttgggtaaaaatcattgttgatttggttttttccaaatggagtgtatctgtcttatcaagatagataccaagttgtagcaaagtgcacacctctgactctctttggtatatgttcatatgttctttatattttgatgtgagtatatatacactaagaacaagctaaattgtgatttatgcttcatttattttaactgataatggttttaaatacgttcctga

SEQ ID NO: 2259 - DNA, 506 bp, Mus musculus
aattttaaacattttattgaacttgcctgcaaacaccacttaattgaactctccaccccaaaggactctagtccagtagatcctgtgcctcaaggcttcacagacaggggtgtggccagcactccccccactgatggccacaggaccagcctgcagagaggaagggagcaggggccaagagaagaagggccagccaagcctcaggggcacttagccagtaatgctcctgaggtacagtgaattcatttgccttacaaaaacccagaaaacctgtatgaaatctcagcactatcctgagttaaatatatatataaaaaaggggggggacagtcagaaaacacctcagttagggtgccggcacctctaggggttggggggcagggaccaggccctgccccagctgcacttcactgaagctgcaaataccaggccccacccagcagcaagaagaccagcagcaccatcggaaacagctgcccagggtcctggtcaggtgacacccaggc

SEQ ID NO: 2260 - DNA, 559 bp, Mus musculus
gacaggtctccgggagcgggatagactgagaccctataggaagccaactgaaggggctccaagcacacacaccccacacttgttcttcaatgttcaccagaaaccaggtggccttgaggctggcctgttttttttatgagatggacctgtgtctgcggagcccccgtctggtccagctgcctgggattgctatacacagactcgctgtcacctacagccggacaggtgtcagaggtattttcaggagcttgattcgaagcctcaccaacctcagggaaaacatctggtcctggagagtcttgactcctggcgcctgggtgtcacctgaccaggaccctgggcagctgtttccgatggtgctgctggtcttcttgctgctgggtggggcctggtatttgcagcttcagtgaagtgcagctggggcagggctggtccctgccccccaacccctagaggtgccggcaccctaactgaggtgttttctgactgtccccccccttttttatatatatatttaactcaggatagtgctgagatttcatacaggttttctgggttt

SEQ ID NO: 2261 - DNA, 615 bp, Mus musculus
acgttagaaaaatcatttatttctgctcctttcatacatcatgttgttcaggaaacaagtctcccgtatgcatctgaaattgcagagtagcacacacaccatttaaagcaccactgcaggaactggccaatcgtccaaatatctcagctctcacaatatacttctcaatttgcgttaatttctgaaaatcagaaatatcatgtccaaaagctgatgatgggtttgtaaaaaataatcactttattcaataccaaagttttaggaggagtatattttctttaagaaataaaaaactaagaaaaaatgccgtttaacatagctggtacactggggtaggtcatcaagggaaatactgtaatgaacttgtctctgatcccgtgacttccggtcctagcgctgctgtgcttgctagggtgtcgctcagtgcagcgtttacactgctcttctttcttttccacattgcaggagggagtgggtcagcctttaaaacttcaggaacaggagcaaatccgggatccactgatttccgctcaaaagacactagcccatcaggtagcccggcaattgcatactcatgaacactctggccatgaagaaactcaggagaacacagac

SEQ ID NO: 2262 - DNA, 528 bp, Mus musculus
  misc_feature (1)..(528): n is g, c, a or t
caagaggaataagagatttaatgatggaaagtatggggaaatcacagttttcagacatgagtaatcaaaaacttgacatttttcttgatatccaaatctagatgtctgtatcaaaccagaggtantggccttggggatggcagtgaagactgttaggaccattagatcagattgttctgaaatagaaatacaggagtggggccctggggggaccgcattaggccagaaggtcaaattatgagaaaggagccagtgagaatactggacaaaataagcatgatattcaatcagtgaggggaaacagcatttgcgtagggctcttgccttcagagcccataatcacaggcctcggggctgtcctgtaggtagagatttaagtactcgcggtaggtcttggcatcaattttgtgagaggatgccacagggtcttgctgcatggccgccatccagagcttgagcttgggggtgtgggctagacactccttgagctccaatgcttccagtcgctgaaaccaaggccaagtaaga

SEQ ID NO: 2263 - DNA, 556 bp, Mus musculus
ttgattgcaagctttgttaggtcgaagagaaaggaagactctccgaacctaagggaagcgttggagaacgaattcaaaaagctagaggagggcatggataattacaagagcttccttggtggggattctccttctattgttgattatcttacttggccttggtttcagcgactggaagcattggagctcaaggagtgtctagcccacacccccaagctcaagctctggatggcggccatgcagcaagaccctgtggcatcctctcacaaaattgatgccaagacctaccgcgagtacttaaatctctacctacaggacagccccgaggcccgggaatattggccttctggaagggcaagagccctcagcaaatgctgtttcccctcactgattgaatatcatgcttattttgtccagtattctcactggctcctttctcataatttgaccttctggcctaagcggtgccccccagggccccactcctgtatttctatttcagaacaatctgatctaatggtcctaacagtcttcactgccatccccaaggccatca

SEQ ID NO: 2264 - DNA, 729 bp, Mus musculus
gcacttggtgtttcggacccgggcagacctccgctttgctgtctctccactttcctctacagtcttcttacgctttacccctttcttagacttatctcctccagaaacatcacccataggagtgcctgtgtccagcaggctgggactgtgcagtgggaagctagctgcggtcacagaggtgtaggagagcacaggctcagccacggcaacagttggattggtgcaaataggacttggctggaccacactgacaggtgtaaccactacagaggatgctagcagctggctgggatcctggtagtcagacaggtcaatcctcttcccaaggctgggcctcgggggctcacaggtggtgaggtgactgtacatggcaagcaagctctccccaaggcacttccacgtgaagaaagggatgggctgcactagtttcaggtctggttccttttcccgcacgatcaacgcttgcctcttcttccgcagccccagagcctcatctacaatggcctgcgtctctgctgcactcactgacacatcgtgaatcgacatgtcacacttgagaaacattcggagggagtcctttcggagacaaggctgctcttcaaaaatcttctccttgaggaccaggcctttgctgtaccggcagtctttctccagggctttgcagatgaagtaaagacatgttgtgtaatcactgagggtgtacaaaacagtgatgagattgtccaggca

SEQ ID NO: 2265 - DNA, 404 bp, Mus musculus
agaagggaaaaaagggaaaaaaaaaaaatggtttgggggaaaacggaggaaagggttaaggagggagagaaccggagggaagaggaaaaaagagaaaaaacaggaaacaggaaaaaaaaaaaaaaaaacaagggggggaggacagagaacgcaggaaagacacaagaacgaaaaactggggaaaaaaaaagagacacgagaaaccaagaggaaaaacgagaaaccaaggaaagacaagaaaaagaggaagggaaaaagagaaacacaagaacaacaggaactggctggacaaaagaaggactgaaaagaacaccctcagagaagacacaacatgaacttaaactaatacagcaaagccctggagaaagactgccggaacagcaaaggcctggacctcaaggaga

SEQ ID NO: 2266 - DNA, 217 bp, Mus musculus
ggaaggaagggaagctactttattgcagggatggtaagcagcgccccaggcagtctgtccttgagctcctttgatcagttcacctttgtcagcttcagagtccacgcaaactccaccggcagaacggtaggtgtcaactgtggcagagagatgaggacgccctccagtggatcctgggtccagctcaggtctccttctagtcctagcggatagtcga

SEQ ID NO: 2267 - DNA, 228 bp, Mus musculus
cctgagctggacccaggatccactggagggcgtcctcatctctctgccacagctgccacctaccgttctgccggaggagttagtgtggactctgaagctgacaaaggtgaactgatcaaatgagctcaaggacagactgcctggggcgctgcttaccatccctgcaataaagtagcttcccttccttccacaaaaaaaaaaaaaaaaaaaaaaaaaaagggcggccgc

SEQ ID NO: 2268 - DNA, 752 bp, Mus musculus
ctaaaaacatatccatattttatttcatttaattggggggctggggaggaggtcagagatccacatgtccctgtcaccctccctccacccccaaggctgggattaaaggtgtgcacacacagccagttcctcatattttaatagtccccaaagttcaacctggaaagattaagaaagataagccatgtcctctaaaggctgaggtcagaggtcagatatccagaagtgggccattactggaggaagttggctaccaggcaggtgagtgtggggaccaacagagtgggcaggggcaaagacagcagctgtcctggggcatgggacttgaacacctggcgttttcccagcggctgcaggggcctcgcattgtccttcatgttcaacttctgatcttcgtcatagtacagattttttgagaattccaggaactggtttttgtggatcttgatgggttgtttgtacacagtccagatgacagtctcatcacagtttggtgtggttagtgagccattgtaacggaagtaggtatacattttggtgctcgggggaagcatgtcctgcaaactgctctccctcactgtagaggttgaatggggtttggagatactgggcagtgcttccaccaggggctggaagcttggttcaccttggctcctacctcaatcataaatgccagcactgcaaacttgtccttcgagtcctcttgctagatgtcaacttcttgtgcacgatgtcatctccatggcaaagtg

SEQ ID NO: 2269 - DNA, 465 bp, Mus musculus
ccacgtaaactggtcttttattagcatggaccattggatacggcagcttccagcatgccgagggagtgagggaggcagggagccggcaggcagcgggctctcacttcttccactcattcttgtcatagtcccacttggcggagaagccctgaatggggttggccttcatgtccagcattcgcttggtctgcatggccacccagtcacgatcgaaagtatgagggatggggccatacacatagctcttctcccaaatcagaacgagcgcagtgaagccaatgaagaacatggccatgcccacaactgtcttccattcattggtgcccctgttcatctcggcgaagctctcgttaaactggatgcggtacaactgaactttctcatccctggaaaggctgctccagtcggccttctccttctccttcagcgccttctggctggcagacagcatcgtgacatgggcca

SEQ ID NO: 2270 - DNA, 570 bp, Mus musculus
gagcaccccagggtgtagagggcggtcgcggcggtcgcctgggcagcggtggcagaatgttggcttccagagcgctgagcctgattggcaagagagccatttctacttcggtgtgccttcgagcacatgggagtgttgtgaagagtgaagactatgctttccccacttacgctgatcggcgtgactaccccttgcctgatgtggcccatgtcacgatgctgtctgccagccagaaggcgctgaaggagaaggagaaggccgactggagcagcctttccagggatgagaaagttcagttgtaccgcatccagtttaacgagagcttcgccgagatgaacaggggcaccaatgaatggaagacagttgtgggcatggccatgttcttcattggcttcactgcgctcgttctgatttgggagaagagctatgtgtatggccccatccctcatactttcgatcgtgactgggtggccatgcagaccaagcgaatgctggacatgaaggccaaccccattcagggcttctccgccaagtgggactatgacaagaatgagtggaagaagtgagagc

SEQ ID NO: 2271 - DNA, 367 bp, Mus musculus
atttttcttcttttattagaatttttttctttttttctcaaaatgttttatctaaaaacaaaaacaaaaagaaaaaagaaaggaaaaaaaaggaaaaaagaaaaaaaaaatgactgaaaacttcatggatcaagtgggagaaaggagaggaagccaggagccaaggctccacctcttcagagcaagtccgcaccctggggcaagcaaagccaggcagcccctcagacccagcctccgactgggcagagggcagtcacagtggtccaagggccagaggggctggggccaaggagtcacaggaaatagtcggccactggctttttggaggggatgccacgtgtctcttggggtgcagcggatagtccag

SEQ ID NO: 2272 - DNA, 381 bp, Mus musculus
ctgcaccccaagagacacgtggcatcccctccaaaaagccagtggccgactatttcctgtgactccttggccccagcccctctggcccttggaccactgagactgccctctgcccagacggaggctgggtctgaggggctgcctggctttgcttgccccagggtgcggacttgctctggagaggtggagccttggctcctggcttcctctcctttctcccacttgatccatgaagttttcagacattttttttttcttttttccttttttttcctttcttttttctttctgcttgtgttcttagataaaacattttgagaaaaaaagaaaaaaattctaatcaaagaagaaacatagaaaaaacaaaaaagggcggccgca

SEQ ID NO: 2273 - DNA, 565 bp, Mus musculus
aggagggggtctagctttctctttagttatcactctgaggggctcaggtcacagagaaggcacttaattgggaaggtcatctgattccggccatcttctttcccttcaccaacccccttggcacttgtttgggggttcacttaaccctcataatctggggagagagcctaagggcttgaactgcaaactctgcaggtatggggaggggctttaaaaacagaaggcagaaacccaggagctgcccccagccagcggggggccatggaggaggctgcacggaacagggaaggaggagttggcacaggaggagccagcttggttaaggtttggagactccctaaccccacaagaaggttccaccccctgttgatactctgaaggcacgtgacatctggggtttagaggcacctaaaaatgaagcagagacaaccccctcccactaagactggtgggactagctcactgctgggcactgaaggtactcaataaatgtcttttgaatgaagagtaaaaagggttgggacagacagaagacccgacctgacggatagtcgaaatatgcgtg

SEQ ID NO: 2274 - DNA, 579 bp, Mus musculus
  misc_feature (1)..(600): N IS G, C, T OR A
tcaggtcgggtcttctgtctgtcccaaccctttttactcttcattcaaaagacatttattgagtaccttcagtgcccagcagtgagctagtcccaccagcttagtgggagggggttgtctctgcttcatttttaggttcctctaaaccccagatgtcacgtgccttcagagtatcaacagggggtggaaccttcttgtggggttagggagtctccaaaccttaaccaagctggctcctcctgtgccaactcctccttccctgttccgtgcagcctcctccatggccccccgctggctgggggcagctcctgggtttctgccttctgtttttaaagcccctccccatacctgcagagtctgcagttcaagcccttaggctctctccccagattatgagggttaagtgaacccacaaacaagtgccaagggggttggtgaagggagagaagatggccggaatcagatgaccttcccaattaagtgccttctctgtgacctgagcacctcagagtgataactaaagagaaagctagaccccctcctaaannnnnnnnnnnnnnnnnannnaaaaaaaaaaaa

SEQ ID NO: 2275 - DNA, 283 bp, Mus musculus
ctgagagaaaacgctgctttaatcaagatggacttgaagaccttaacctaacacacacacattattgacactgttgcctgtcaaaaaaacaggaaagagatttctgatcagcaaattcaggccgggagggatttttaagtaggctttgctaaaacttcactaacaaataacccaacatcacgtttacagtttatcagttcacaaggaagggctgagcctccttccagtctgtagcccgatccctggcctcaagagttaccaggggtcctggagccccctcccc

SEQ ID NO: 2276 - DNA, 404 bp, Mus musculus
cattttcctgaaggcccgaagccaactgggaagatgctttcggacagccgttctgatcagtccccgggttatctggagcgggtggagctcattagaaacacctgcaaggaggaggctctgcggaacctcccacactctgtggtctcgaagttcgtcctggatcgaatatttgtctgtgacaagcacaagattcttttctgtcatactcccaaggtgggcaacacccagtggaagaaagggctgatcgtcctaaatggagcattttcttccattgaagagattcctgaaaatgtagtccatgaccatgagaaaaatggacttccacgcctatcttcctttagcaaaataggaactcagaagcgattgataacatacttcaagatttttattgtgagagatccctt

SEQ ID NO: 2277 - DNA, 541 bp, Mus musculus
aacagaaggaaatattttatttactgcattggatcagattttgaaagttataggaacacttaaataatctaccttaagaatcaaaacttggaaaatataacaaagtcattcattatattttcctttctacattttggtggtggtggtatgcgttgttttttttgtttttgttttgttttgcttttccaagacagggtttctctgtatagccatggctatcctggaattcactctgtagaccacgatggtctcaaactcagaaatcgagctgcctctgcctcccaaatgctgggatcaaagttctgcaccccatgcctggcctttgtccatttttatggacttaagatttcccctatcttgtaaaaatagtaaatatggcttgaaaatgcatattattacaagatgttttaatagtttaaagggcctatattaagtcatatatcatttagatttccatgattcaagcatattaaagtattccaaaaattaagattaaaaaaaagaacaacattcattttagtctttaaaagattttcattca

SEQ ID NO: 2278 - DNA, 185 bp, Mus musculus
caggagtgatgaccaacaaagatgagattccctacctgcggaaggggatgagtgggcggcccacgaggactctgattgagttcttacttcgattcagtaaagacagttcttagctcactcacagattactccatctgccttgaattggatatttgaccttcaaaatattttcgaatgaatgaaaa

SEQ ID NO: 2279 - DNA, 498 bp, Mus musculus
ccacgtaaactggtcttttattagcatggaccattggatacggcagcttccagcatgccgagggagtgagggaggcagggagccggcaggcagcgggctctcacttcttccactcattcttgtcatagtcccacttggcggagaagccctgaatggggttggccttcatgtccagcattcgcttggtctgcatggccacccagtcacgatcgaaagtatgagggatggggccatacacatagctcttctcccaaatcagaacgagcgcagtgaagccaatgaagaacatggccatgcccacaactgtcttccattcattggtgcccctgttcatctcggcgaagctctcgttaaactggatgcggtacaactgaactttctcatccctggaaaggctgctccagtcggccttctccttctccttcagcgccttctggctggcagacagcatcgtgacatgggccacatcaggcaaggggtagtcacgccgatcagcgt

SEQ ID NO: 2280 - DNA, 691 bp, Mus musculus
gagcaccccagggtgtagagggcggtcgcggcggtcgcctgggcagcggtggcagaatgttggcttccagagcgctgagcctgattggcaagagagccatttctacttcggtgtgccttcgagcacatgggagtgttgtgaagagtgaagactatgctttccccacttacgctgatcggcgtgactaccccttgcctgatgtggcccatgtcacgatgctgtctgccagccagaaggcgctgaaggagaaggagaaggccgactggagcagcctttccagggatgagaaagttcagttgtaccgcatccagtttaacgagagcttcgccgagatgaacaggggcaccaatgaatggaagacagttgtgggcatggccatgttcttcattggcttcactgcgctcgttctgatttgggagaagagctatgtgtatggccccatccctcatactttcgatcgtgactgggtggccatgcagaccaagcgaatgctggacatgaaggccaaccccattcagggcttctccgccaagtgggactatgacaagaatgagtggaagaagtgagagcccgctgcctgccggctccctgcctccctcactccctcggcatgctggaagctgccgtatccaatggtccatgctaataaaagaccagtttacgtggaaaaaaaaaaaaaaagggcggccgc

SEQ ID NO: 2281 - DNA, 503 bp, Mus musculus
aaacagacactttattggaatagttttaaaagtagcactctaagagggaaatccccttgcatcccagaggcaattgaaaatagttatgtagctgggcagaggtggtgcaaacctttagtcccagcattctggaggcagaggcaggcaaacctctgagtttgagatcagcctggtacagagtgagttcccggacaaccagggctacacagagaaaccctgttttgaaagggggaaaaaaaaagaataacaagaagatgatgaagaagaaaaagaaaaatgtacagtaattacacattccacacaccacacacacatctgaagaatctaagcaatgcaaaataaggcccagatgggggggcatcagaagtagagatgaccatagggtaagaaagcagtgtctttcgagctgctctctcacccgagcagcctctctccaagcacagggtcaggggccagaagagatgtgtgtgctggggtacagcttaagacacagtacgtacaag

SEQ ID NO: 2282 - DNA, 594 bp, Mus musculus
ggacacggtaaactttgacctagctccatcaattcaggaactacctatccagtcagctatcacacaacctcaagatggggccattgtagagtcaggcgaggtgactatcaagggctatgcatggagtggtggtggcagggctgtgattcgagtggatgtgtctgtggatgggggactaacctggcaggaagctgagctagagggagaggaacagtgtcccaggaaggcctgggcttggcgaatatggcagttgaaagctcaggtgccggctgagcaaaaggaattgaacatcatttgcaaagctgtagatgacagttacaatgtgcagccagacactgtagccccaatctggaaccttcggggcgtactcagcaatgcctggcaccgtgtccatgttcaggtggtcccatgaaagcatggaatggcaccatttgtacccaaagaaccacctagacctcttcaccaacccagccttaatcctcattgctgtagataaacatttccttcctctccttgattcgtaaccttgtacgtactgtgtcttaagctgtaccccagcacacacatctcttctggcccctgaccctgtgcttg

SEQ ID NO: 2283 - DNA, 449 bp, Mus musculus
acgtatctgagtattttgcctgcatgtatgaatgtgcaccatccatgcggaatgccagaggcacacaaaagagtgtaccagaactcctggagccagagctgtgaactgattgatatgggtgtgctgagacatgaaatgaacacaggtccgctacaagagcagcaaacgctcttatcccctgagccatctcatctccccagctggcccccaaccccaggtggtgaagatggctacctggatatcagtcagctttcccaggattcgacttgcaagcttggggccattctccatcgttggaatatgcagcatctggcccttgtacagaatatcagagactgggcagacaacgcaggctgtccctgagccgaacatctccttcactctgttcccctcaagggcggtggccaggtcatccatggtgaggtgtctctcacataccttaaactcac

SEQ ID NO: 2284 - DNA, 377 bp, Mus musculus
tcggaactgagccatctcttggcgtcaagaagccttccaaagccctactctttgtgatcctgagccccgtgggaccttatttttctagtggatcttttactccggtgtccctgtgggccaatccaaagtacatcagagcctggaaaggtgggactggagactgcaagatgggcggcaattatggagcctcccttctggcacagtgcgaggccgtggagaatggctgtcagcaggtcctgtggctgtacggcaaggacaaccagataactgaagtaggcacaatgaatcttttactctactggataaacgaagacggagaagaggagctggcaacgtccttactagatggcatcattctcccaggagtgaccaggcag

SEQ ID NO: 2285 - DNA, 449 bp, Mus musculus
gggggctcaggtctttaatcccagcactcagggagcagaggcaggagcagctctgtgagtctgaggccagcctgggctacagatcatcgagttccaggatagcaagggctagagagtgacccactcctcccacacccccaccacacacacacaccaaaacacaaaaagcaaaaccctaaaatatacttgatgattcaaaataagaatatctggttgagagtagagtgtggtattggaatggttacccggggtgatagtttacatcttgggccagagaggggcactattaggtgtggccttgttggaggaagtgtgtcactgtgggcgtgggctttaataaactagtcctagctgcctggaagtcagtcttcctctagcaaccttcagatgaagatgtagaactctcagcccttccagcaccgggcctgcctggatgctgccctgctccc

SEQ ID NO: 2286 - DNA, 670 bp, Mus musculus
tcaatgtctttgtcgtgtccgtctttgctgaagcattttttgagaaaaccaacaagcaggtggttgaagtctgcaaaaataacagcagcccccatgctgacctctttcccagtgacaactctactctggctgtggacatctacaaagggggtgttgtgcttggatgttacttcgggcctgcagctctctacatctgggcagtggggatcctggctgccggtcagagctccaccatgactggaacctattctggccagtttgtcatggagggattcctgaacctaaaatggtcgcgctttgcccgagtgatcctgacccggtctatcgccatcatccccaccctgctcgtcgctgtcttccaggatgtggagcacctaacggggatgaatgacttcctgaatgtcctgcagagcttacagctcccctttgctctcatacccatcctcacgttcacaagcctgcggccagtgatgagtgagttttccaatggaataggctggaggattgccggtggcatcctggtcctgatcgtctgctccatcaacatgtactttgtagtggtttatgtccaggagctagggcatgtggcactctatgtggtggctgcagtggttagcgtggcttatttgacctttgtgttctacttggtaagtccagtgtgaagggagca

SEQ ID NO: 2287 - DNA, 417 bp, Mus musculus
ccataaagctggcatttattttaagggtcagcacagcgtaggggaaagcatggccactttaaagcagcgaactggggagggagacgactttaaaaaagagcatttcttgaacatgtttttaaaaagatcactaaaaaaaaatgtagcacagtacacaaagtcacagcaggctctggagtactactgagaaaggccattttgtctgggcgggaggggcctctggttttacaaagctcattcccctttgttagactgcaaacaacttttagcttaaactttgtttttagagatgagaaaacaagccagccgggggggggcaggctgaatcctagctccaattcaggaggcaaatgcaagagggctgccacgagtttgaggctggcttggtcacctatcaggttccaggccaaccagggt

SEQ ID NO: 2288 - DNA, 571 bp, Mus musculus
acccaggcccacttatccatctacagcgagtagtatggcggccttccttgaacaggctttttcttttctctcttcgtggtgcttgggatggaacccagggctttgtttaggcctgacaaggctctgcccctgagctgtgccaagcccacctccctctgtgtacaaagctcctttcttgggtgaccaacatcttcctgtctttgagcaaccaaggccagcatgcgagccacccagaagttaattaaaccaggttcatcgggagtttgctgaaatgttaagcatactctgttctagagagggagtgaagaaggggccatcttaaactcccgtgaggcccaggcctcgtgctcctgccccacctccatgtgcatcagactgggtgagaggtccttcacttgtcttgggataaattgtagttgtcttagtgagtgtgtatttccacagttttgcctcatgtcagtccccacgcggaaggatagccttctgagttcttcttgcctttgttttgagacaggatgttactctgaaaccctggttggcctggaacctgataggtgaccaagccagcctc

SEQ ID NO: 2289 - DNA, 492 bp, Mus musculus
ggtgatggcagaggctgagggtggtgtcactgggggcttagagtaaatggatgtctggcaggcttaggcaggcagactgaggaggtgactgaaagccaacagttgaggggactggctgaggctgatgtgatgttgtgtggtagctatgaggttaacagtgcaggctgtgtctccctggggccagccaaagtcaaccagcccatgttaaaagacttcagtggagcccagctccaagtgcgctctcactaggcagtaaaggacacttggctgctgactggagaagaatggcaagaggggaagccaaggtccacagagaccctgcagctacatgtccagaccattctaacagcacaggggctgctgagttagggaaagggcatacatgggtagtcctgggacctctgccctttcccatcaggttacagcctgcataagtctagttagacaattacccctctaactcctcttcacagagaggatgctgggtggggc

SEQ ID NO: 2290 - DNA, 584 bp, Mus musculus
gaacatcccatgtggaatcatgaagaaggcccagaggtcaggttctggaggtgaccctgagccccacccagcatcctctctgtgaagaggagttagaggggtaattgtctaactagacttatgcaggctgtaacctgatgggaaagggcagaggtcccaggactacccatgtatgccctttccctaactcagcagcccctgtgctgttagaatggtctggacatgtagctgcagggtctctgtggaccttggcttcccctcttgccattcttctccagtcagcagccaagtgtcctttactgcctagtgagagcgcacttggagctgggctccactgaagtcttttaacatgggctggttgactttggctggccccagggagacacagcctgcactgttaacctcatagctaccacacaacatcacatcagcctcagccagtcccctcaactgttggctttcagtcacctcctcagtctgcctgcctaagcctgccagacatccatttactctaagcccccagtgacaccaccctcagcctctgccatcaccaaaaaaaaaaaagggcggccgcgcgatgggac

SEQ ID NO: 2291 - DNA, 327 bp, Mus musculus
aaaatcgggaatagtttatttcaaagatttgacatttacaaggagaggcaccacatgctatctgacagtaaaatactgcagggactgaaggccaaggagagagatccacagaagacaggcctgtagggcaggcattgcatcgaccttgcccacagggctttgttcccaactcaggacagaactttagggcttgcttcatttactggaaaagttcactggacatagtttccactttttcccccacagtttccagctaaaaaaacttaagctactactcctcgatgctctcatagaggctcttgatttgggtctggaaaaacttggcaa

SEQ ID NO: 2292 - DNA, 624 bp, Mus musculus
tccagggtatcttattttcctgtggaggcaaaattgggttcttccaaggagatatccggttgctacctgatgacatgaaggctttgaaacccacagtgtttcctacagtgcctcgactccttaacagggtctatgataaggtacaaaatgaagccaagacacctttgaagaagttcttgttgaacttggctatcatcagtaaattcaatgaagtgaaaaatggcatcattcggcgggacagtttgtgggacaagctcgtgttttcaaagattcaaggaagcctgggggggaaggttcgcctcatgatcactggagccgcccccatctccactccagtcttgacattcttcagggctgcaatgggatgttgggtgtttgaagcttatggccaaacagaatgcacaggtggatgttcaattacatcacctggggactggacagcaggtcatgttgggactccagtggcttgcaattttgtaaagctggaagatgtggctgacatgaactacttttcagtaaacaacgaaggcgagatctgcatcaaaggtaacaatgtgttcaaaggctacctaaaggacccagagaaaacacaggaagtactggacaaggatggatggcttcaca

SEQ ID NO: 2293 - DNA, 412 bp, Mus musculus
actaggaaataaacattttttattatatctttttacatttggtcaaagtactttataaaccagtggaaatggaatcatcaaaccattttatacattgaatatatacaatataaaaagtagtattaaaaaggggttgtttatgtgagtgaatatgagaagactcggcagtgttgcttgaatactctctacaagaggctgaactctatagaattaacctggcatagtttattttatgtatgtgagtacacggtgtcttcagacttagcagaagagggcgtcagatcccattacagagccaccatgtcgtttctgggaattgaaatctggtcttctagaaaaaggttcttttgaggacacttagaacttaataacacagtacaggttgctcccttgacttacacctttactatta

SEQ ID NO: 2294 - DNA, 430 bp, Mus musculus
tcccccaacaaggcagtgattgttcccgggaacggaggcggggatgtggccacccacggctggtacggctgggtgaaaaaggggctggagcagattcctggtttccagtgtttggctaaaaacatgcctgacccaattacagcgcgagagagcatctggctgcccttcatggagacagagctgcactgtgacgagaagaccatcatcataggccacagttccggggccatcgcagccatgaggtatgcagagacacatcaggtatatgctctcgtattggtgtctgcatacacatcagacttgggagatgaaaatgagcgtgcaagtgggtacttaagccgcccctggtagtgtgagaagatcaaggccaactgtccttacattgtacagtttggctctactgatgaccccttacttgcctggaaggaac

SEQ ID NO: 2295 - DNA, 536 bp, Mus musculus
ggggctatatagaaaagcaatttattccattataagcacttacacagttagtcatggagagtaacaggcctgatggtgagacaggtcaaccaaaatggagatggcatcaaactatagtggtcaaagactaacccctaaaaaagcaacttttatcaaggattaatttaatcttaaaaacaaacacaaactagcaatccactctttctcaacttgacagttcaccagtggaacaactgccaggtaaaaacatacatctttacaacttggtggtcccaagtttaaaaaaagaaagaaagaaaaaaggaaagaaagaaaaagaaaggaaggaaggaaaaaccacacacaacaaaaaccagactttgttcagctacctcaaaccaatgttaaatccatctcggggttcagaggaaaacaaggagagtctaggatcacaggtgcagacacgtctaggacccttgtccctctggatccacacttccttcaggattttcatcattgtaaatgttctccgccatctgccacacttgcatgatatt

SEQ ID NO: 2296 - DNA, 765 bp, Mus musculus
atgagactatcttagcttccagtggtaccgatcgtaggctgaatgtctgggatctaagtaaaattggagaagagcagtccccagaagatgcagaggatggcccaccagaattgttgtttattcatggtggtcacactgccaagatatctgacttctcctggaatcccaatgagccttgggtgatttgttctgtatcagaagacaatatcatgcaagtgtggcagatggcggagaacatttacaatgatgaaaatcctgaaggaagtgtggatccagagggacaagggtcctagacgtgtctgcacctgtgatcctagactctccttgttttcctctgaaccccgagatggatttaacattggtttgaggtagctgaacaaagtctggtttttgttgtgtgtggtttttccttccttcctttctttttctttctttccttttttctttctttctttttttaaacttgggaccaccaagttgtaaagatgtatgtttttacctggcagttgttccactggtgaactgtcaagttgagaaagagtggattgctagtttgtgtttgtttttaagattaaattaatccttgataaaagttgcttttttaggggttagtctttgaccactatagtttgatgccatctccattttggttgacctgtctcaccatcaggcctgttactctccatgactaactgtgtaagtgcttataatggaataaattgcttttctatatagccccaaaaaaaaaaaaaaagggcggccgcc

SEQ ID NO: 2297 - DNA, 565 bp, Mus musculus
  misc_feature (1)..(565): n is g, c, a or t
ctnnnnntttnnnnngganncaggagggnnnanncacaaggganncngggannancgngcccagccgggcagcnctaccngcggnaccagancnncagcnncggnncacgctngancnnccgnngcagcagcaagatgtttttttggagngctncggccgngggcgggcagcctggcacatagatgtccactggcacaatgcggtcacagccacgaacaaccgagtaggagtagtggtagtagccaccgccattggcacagctccccatggacaccacatagcggggttcgggcatctggtcgtacacctttcggagcgcgggggccatcttgttggtaagcgtgccagctacaatcatcacatcagcctggcgcggactggcacggaacaccacaccgaagcggtccatgtcatagcgcggggcaggcatgtgcatcatctgcacgggacaggacgccaggccgaaggtcataggccacagggagctncggcgtgcccagttgatgagggcatgcagcttgggcaccacatactcaggccggctttggtgaagatgagagagct

SEQ ID NO: 2298 - DNA, 585 bp, Mus musculus
ccaagatggcggcgctggcggctcctggcctgctctctgtacggatcctgggtctgcgcacagcacaggtccagctgcgcagagttcatcagagtgtagccactgagggcccgagcccgagcccaagcccgagcctgagcagcacacagtctgctgtgtccaaggctggagctggagccgtggtccccaagctctctcatcttccccgaagccgggctgagtatgtggtgaccaagctggatgacctcatcaactgggcacgccggagctccctgtggcctatgaccttcggcctggcgtgctgtgccgtggagatgatgcacatggctgcgccgcgctatgacatggaccgcttcggtgtggtgttccgtgccagtccgcgccaggctgatgtgatgattgtagctggcacgcttaccaacaagatggcccccgcgctccgaaaggtgtacgaccagatgcccgaaccccgctatgtggtgtccatggggagctgtgccaatggcggtggctactaccactactcctactcggttgttcgtggctgtgaccgcattgtgccagtggacatctatgtgccaggct

SEQ ID NO: 2299 - DNA, 260 bp, Mus musculus
  misc_feature (1)..(300): n is g, c, a or t
acataaatattggtttttattatcagaaacaagtggccactctatagtaaggtacaatcaaattacattgtcactatggtccaaacatccgctgttggcactttgatctcagacaagacnttgnggttcacaaacctaaggcacttgaattcttgcctcgactgaagaataggggcagngtntgagaactgaaccttttgtgattacccaggggctgccctttgtttatgtgtgttaagctgaaacatggatactatgaa

SEQ ID NO: 2300 - DNA, 579 bp, Mus musculus
gccctgattggtcctgaggctgaacaggaaaagcgagacaaaatggcctcacccgcctacacacctctgaccaccaccgccaaagttcggcctaggaaacttggattttcacattttggaaacatgagaaaaaagaagtttgatgaatctacagattacatttgccccatggagcctggagatgctgtcagtgacagccacagggtctacggagtctaccggggcctcagtccccttgacaaccatgaactagatggtttggaccaggtgggacagataagctgatgaccctgttatctgccttctctgtgcacggagagctcacagtaacactgtgtgtcaccacgtaactgcacttcaccctcgtccttttgcatgatctacagaaaacaattgtgtctttgggctggtctcactacacactttaaggatggtcagaatatgcagttatacagccacaaaggggacagactttggggaactatagccaaatgtggactctgggaaaacacctgcagacattagtagatgtttagtaattcatagtatccatgtttcagcttgaaacacatgagcaga

SEQ ID NO: 2301 - DNA, 135 bp, Mus musculus
  misc_feature (1)..(135): n is g, c, a or t
nggggggtgggggtggtggggggggggggttggtgggggttgggggggggtgtggttggtntgggggtgggggtggggggggggggggggggggtgggggggggggtgggggggggggggtgggggggggggggg

SEQ ID NO: 2302 - DNA, 585 bp, Mus musculus
attcccgcagcccgaaacaccacccaggccaaggacccctgggaggcctctcagctcatatggaatggacagccgacctcccatggcaatttttgagttgttggattacattgtcaatgagcctcctccaaaactgcccagtggagtattcagtctggagtttcaggattttgtgaataaatgcttaataaagaaccctgcagagagagcagatctgaagcagctcatggtacatgctttcatcaaaagatctgacgccgaggaggtagacttcgcaggctggctctgctccaccattgggcttaaccagcccagcacaccaacccacgctgccagcatctgagcctttaggaagcagcaaagaggaattctctgcccagggcatgccatgttgctttcaggcctctcccatgcttgtctatgttcagacgtgcatctcatctgtgacaaaggatgaagaacacagcatgtgccaaattgtacttgtgtcatttttaatatcattgtctttatcactatggttactcccctaagtggattggctttgtgcttggggctatttgtctgttcatcaaacacatgcca

SEQ ID NO: 2303 - DNA, 531 bp, Mus musculus
aagtaactggatttttattttaatacacagtatgagaaatgaacttgtaaatcaactgaattgtatggaaaatgaaacagtaaataaattagacccatgtttaacacagaaggtcagctttttttcaaacttaaggctatcatggacaggtcaattccaccagtcttctttaaaggttgaagtcttccaagtacaactttgctatgaactggcccagagttcatcagcaaatgggaatgcttaacaggggtggtgatcggggacacgtttccttggtgctgctttgataatgttgtccactcgcaggatcacctctgctgcttcagccgcactcagaagaacctgtcgcttcacttgaaaactctctgttatacccagtactgccatatcgccgatggtaccttccttcatatccagtccagcagttatatggccttcactgtgagcagctcggagctgtgccaccagatctgcactgtcatagcccgcattgtcggctatgatggtcggcaacattctcagggcttttgc

SEQ ID NO: 2304 - DNA, 542 bp, Mus musculus
ccttggtgaggcatgcaccattgtgcttcgtggtgccactcagcaaattctggatgaagctggacgatctctgcatgatgctctttgtgttcttgctcagactgtaaaagatcctagaacagtttacgggggaggctgctctgagatgctgatggcccatgctgtgacacagcttgccaacagaaccccaggaaaagaagctgtagcaatggagtcgtttgcaaaagccctgagaatgttgccgaccatcatagccgacaatgcgggctatgacagtgcagatctggtggcacagctccgagctgctcacagtgaaggccatataactgctggactggatatgaaggaaggtaccatcggcgatatggcagtactgggtataacagagagttttcaagtgaagcgacaggttcttctgagtgcggctgaagcagcagaggtgatcctgcgagtggacaacattatcaaagcagcaccaaggaaacgtgtccccgatcaccacccctgttaagcattcccatttgctgatgaactctgggcca

SEQ ID NO: 2305 - DNA, 373 bp, Mus musculus
caggctgagcagagagctttattgcaggggcggagggcacagtgtcctgagcagagagctgagcagagtgtcggtgggcagggggctcaggtagccaggaagcccccatccactgtcaatggggagccagtggtcatgccactccggttgctcagcaggaagagaatggtgtccacgacgttctccacctctgcagacaggcagaggtcaaacgcatagagggaggcttgcctcatccttccaaccacagccaagccccaggcccaggcacgcaccagggcaggtggtgtagttctagtctggactcctgcctaacttaccagcgaacttgcccagtgggatacgatccagcatggccttagctttgtggggg

SEQ ID NO: 2306 - DNA, 581 bp, Mus musculus
tggggcttgcaggtcggcgggcgctggtcaccggcgcgggcaaaggcatcgggcgcagcactgtgctggcgttgaaggcggctggtgcacaggttgtggcggtgagtcggacgcgagaggacctggacgacctggtccgcgagtgtcctggtgtggagcctgtgtgtgtggacctggccgactgggaggccacagagcaggccctaagcaatgtgggacccgtggaccttctggtgaacaatgctgctgtggctctgttgcagcccttcctggaggtcaccaaggaggcctgtgacacatccttcaatgtgaatcttcgggctgtcatccaggtgtctcagattgtggccaagggcatgatagctcggggagttccaggagccattgtgaatgtctccagccaggcctcccaacgtgcactgaccaaccatactgtctactggtgccctcccatgttgtttaccttgctggcatctcttcagatccgtgtgaatgcagtaaaccccacagtagtgatgacacccatgggccggaccaactggagtgacccccacaaagctaaggccatgctggatcgtatc

SEQ ID NO: 2307 - DNA, 491 bp, Mus musculus
agcattagacatacattttactgagttctagaatagccaggaccctagtgaccagggccaagaatgggagaaagcaaatcaaagttaaagcaagaatctctgacactggtcatttttttggacagctccctggactggcagggcaggcacagccttcacgctctcctcagaacacaagggcggttcctgtcacgggaactgactgactgtggcgaggaggagggtgcacctgcaggccacgatgccgtggctgctgctctgggaacttgctcctctgtactcttcaggtacattccccaaaaggattggtttcatagaataaaaagcatttgtgctaccaactttaaaaaatgtagtagggatggtaacttctgcctcaaattccaatccccacagtcaagaatcacctacagcaaggaaactcacaaaggcaccgaatgacacagcagcagccttgccagagccaccgaggaaacccaaaagctaacgga

SEQ ID NO: 2308 - DNA, 498 bp, Mus musculus
gcgacaccagcttacaaggtccattagtgagatcaagccccccaacctcttcccgctggccccccaggagatcacacactgccatgatgaagatgatgatgaagaggaagaagaggaagaataggaaggcgagactagaaaccggagcacccatcaagtctgtcagactcacggggtgaggggtggcctgtttggattctgttagggagggtgggaggactccatcagaagtcctggaaagtttggaaagtttctcaaggctttaaataattctaatcatagctacttcagttttgtgtatctgttctctgcagatggtttgaaactgtataggaagaacaggtaaaggcaggtggagtgcacacagatcgcaccacatggcttgtaatgattttctgtgtctgtcatcgtcagcgtgtcatctggatgtacgaaggtagtaaaaaagggtttcagaacagagccacgggactggtaggaagaggagatccacaaatg

SEQ ID NO: 2309 - DNA, 415 bp, Mus musculus
cataccaagaaatgactgctttgtacatatatttacaaatactctttacattgggtctttccagaaccttccctaatgcctcccttaagacttgacctttgggtgaggattggtttgtaagccagaggggggggaagtcatctgaggcctctctgtattggcttctaagagggaggcgcttgagaagcagagaagataagtccaattcaactacagactgttactctggtggtaggagagctagagttggggttattcttcctcatcagaaatcctagcgaggtagctggagacgcttacggaaggggtggatcccatgggacctgagggcctcctcacccctgactcctaggggcccctagaacactggagggttggacagggccttcatgctcaaaacttccacttggccctt

SEQ ID NO: 2310 - DNA, 674 bp, Mus musculus
tgggacaacgccatctccctggccaccacctgcttccagaggcgtcgctggtgctgttgccgagtgcgctgccgtgcctgctgtatggtgtgcggctgcaagtgctgtcgctgcagcaagtgctgcagggaccagggacaggaagaggaggagaacgcacacgatatcccggccaaggcttctggggcctttgacaatgcagctatgaccaaagagtgtcaagatgagggcaagggccaagcggaagttctgagcatgaaggccctgtccaacactacagcgttctaggggcacctacgagtcacgggtgaggaggacctcacgtcccatgggatccaccccttgcggaagcgactgcagctacctcgctaggactcctgatgagcgaaaataacaccaactctagctctgctaccaccacagtaacaccctggagctgaattggacttatcttctctggttctcaaagcgccctcctcttagaagacaatacagagaggcctcacatgacttcatccacctctggctttaaagccaatcctcacccaaaggtcaagtcttaacggacgcattagggaagggtctggaaagacccaatgtaaacagcacttggaaatatatgtccaaagcagcatttcttggtatgacaaaaaacaaaaacaaaaaggcggggc

SEQ ID NO: 2311 - DNA, 532 bp, Mus musculus
ggtggggtttttttttttttatgggaggagccagggcaatggctaatctttattagagagaaggttttctttacattctgaaaagataacacaggggctcagggggccatttggtggggcaccagcttgtaatgttttccacaggtggggcgggggtgactctcgcctttgggcagccaaaaccagatgacagtacaggtggcctcttcacagatgcagcccactattctcttggtgctgatggacgggactagattagggtcttccttggtgcctgaagctgcctttggaggtagcatattggatgggtccaggcccttctgtgctgctatcatgatctccctctccagcccagtagcctgctcctcatcaggggggacaccacctccagaagccatggagcgggtcacggccgcgccacgggggccgtgggccctcagggcctgcgccggcaaagcgcccactccgcgaagtaaccttgaagccatctcgcccgagacaagcagatgcacttccgggaacggatagtcga

SEQ ID NO: 2312 - DNA, 463 bp, Mus musculus
cacggcccccgcggtgcggacgagacccgctccatggcttctgaaggaggagtacgcactgatgaggagcaagctactgggctggagagggagatcatgatagcagcacacaacggactggacccatacaatatgctacctacaaaggcagctccaggcaccaaggaagaccctaatgtaggcccgtccatgaccaacaagcagaatagcagggcctgcatactgtgcaagcaggcacaacgtggcactcgccataccggctttcggctgcacaaaggcgacagtcagcgatgccccaactgtggaacccattacaagctggagccccaccaaaaggaccactgaggccctgcgatacgattacagaatgcacagaaaaactcgtgtgtaataaacgacagccatgggactggctcctgccatgcgccacaacaaaaaaaaaaagcgcgggcgcacgccccct

SEQ ID NO: 2313 - DNA, 390 bp, Mus musculus
ctatgccttttgttgggggtgggggttttttattttggaggagatggggagatgagtgagattggggtacatgaatcaaaaaaaggtaaaaaaatctcaccactcaggaggcagaggcgggggggtctctgtgagggtcaggttggtctacagagggagcttcaggacagccagggctacacagagaaaccctggctcaaaaacaactctctccccccccaaaaaaacacactactacacacattctgggacagaataatactttaaattctattctgaacagcaggggatctgataacaactagaactcatttgcataaaaaacatatttatctagaaattacattctacatacaggggtaattccaagaagtttcattccattggcta

SEQ ID NO: 2314 - DNA, 514 bp, Mus musculus
aaagggcaaagaaggcattttcagcaagtgttccaaatgctgaagatcatgggctacgactgggcggaaaggtgccagcatgtcccctttgggatagtaaaggggatgaagactcgaagaggaggggtcacttttctggaagatgtcttaaatgaggttcaatcaaggatgctacagaacatggcttccattaagaccacgaaacaattggagaaccctcaggagacggcagagagagtggggcttgccgccgtcatcatccaggacttcagaggcactctcttatctgactatcagttcagttgggatcgtgttttccagagccgtggggacactggagtcttcctgcagtacacccatgcccgcctctgtagcttggaagagactcttggatgtgggtatctcaatgactccaatgctgcttgtttacaagagccgcagtctgtttcaattctccagcatcttctcaggttcgatgaggtactttacctgtcatctcaggacctacagccga

SEQ ID NO: 2315 - DNA, 410 bp, Mus musculus
gctaaagactgtaggaatattttaatgccttaattacattatgtaataataatatcatagtctattttacaagttaaaggtatgagaatgtatgaaatacaagtggtaggaaatttttaaatgggtcagaaaggtaaaattttttcaaaaccagaggctaaagaaagcctgtggggcccaaggaggaggcaggcaggtgacaggcgcagcgtggctcctgggagggtttgttcccatgtttgcgccaggaaggagtcgaggcttatccctgcctttggctggggttgggagtttagtcttgtcagtgaagatggaggttttgggagaaaagccactggccgtctgttcagagctggtttcctggtgcacaggtgggttctgtgttgaaggagtgagtcagctggggtatc

SEQ ID NO: 2316 - DNA, 556 bp, Mus musculus
ttcgaggccagcctggtctacaaagtgagttccaggacagccaggactacacagagaaaccctgtctcgaaaaaccaaaaaaagcaccggctttccagcccgtgtgcccaagaaaatcctcaagtgcaaggcagtgtctcgagaattgaacttttcttcagcagaacaaatggaaaaattccgcctggaacaaaaagtttacttcaaaggacaatgcctagaagagtggttcttcgagtttggctttgtgatccctaactccacaaacacctggcagtccttgatagaagcagcgcctgagtcccagatgatgcccgccagcgtcctaacgggcaatgtcatcatagagacaaagttctttgacgatgatcttcttgtcagcacatccaaagtgaggcttttctatgtttgagagaatttgtgtgcacttctaagaatttggccgggggcaggaggaagctgaacttgttctctgcacacctgactgggataccccagctgactcactccttcaacacagaacccacctgtgcaccaggaaaccagctctgaacag

SEQ ID NO: 2317 - DNA, 31 bp, Mus musculus
ggcttctgggggttcctttattatctttaaa

SEQ ID NO: 2318 - DNA, 341 bp, Mus musculus
accttcacatgagtcctgtgaagaaagaaattgtaaaggaatgcaaggatgattgaatgagcccgccatcttccttctgagcccagcagaggctccagagtgctctccacactgcaggacctctggatcacctcgggatcacagctactctctgatgaagttggtggcgctgtggaggaggaccgccgcctcctggacgaggaccgggagcgctcagcattgtaggagacatgcttgtcgtagttctccatctgtgtctcaatgaagtccctttgctgctgtctgatggtctggctgattagcccagggagggcatgaatgctaccaatcaaagtctctag

SEQ ID NO: 2319 - DNA, 437 bp, Mus musculus
  misc_feature (1)..(437): n is g, c, a or t
cagacaaaagtttttcatgtttatatttgtgtgtttggcggtgtctcgtgctttccaggctggcctcaagttccgaatggagctgggagtgacagggaacttccttttttttgaagntgcagccatggaccattagtcttgttcaggagagaaatgtgcgcactgtgcccttggtggtccctctacagatgggacacttcctcagagagggagcgcagtctttgcccacgaccagatggccacagggaatgaacacgatggatacctctcggtccatacacactttacacattctttcctccaggagtttccgcnactgttcttccattggtngagctgcaatgtcctctgtgggaagactcctaatgtcctgttgcccaaatatatctctgtataacgcagggtcaatttcccgaagggagtttctgaatgaggtt

SEQ ID NO: 2320 - DNA, 545 bp, Mus musculus
ggaagtgggctgcggtgtgagtacttgctcagaatcaaaggccaagaatttgtcagccaagttcaagctggctatcctcatctacttgagcagctattatctacgtcagactccccagaagatgagaatgcagacgcagcaatcgtgcattttggccctggagaaagttcggaagatgtcgtcatgatgagcacgcctgtggttaaagcagccttggaaatgggcttcagtaggagcctggtgagacagacggttcagtggcagatcctggccactggtgagaactacaggaccgtcagtgacctcgttataggcttactcaatgcagaagacgagatgagagaggagcagatggagcaggcggccgaggaggaggagtcagtgcaagggccatcactgaacaggagtgcaatgctgtgaaacagaaaccacacaccttacaagcaagcacactgattgatactgtgttagcaaaaggaaacactgcagcaacctcattcagaaactcccttcgggaaattgaccctgcgttatacagagatata

SEQ ID NO: 2321 - DNA, 531 bp, Mus musculus
ctttctccacaaagaatttttatttgggcttgtcagaaccactgtgctcactagggtctgtggtccaaatcctgctgtcataggtcataggccaaaccaggaagggataccagggcacctcaggtcgctgctttgcctctgctggggtagctcctcttccagaggttctggagaacgggggtccttctctggaaaaagatctgggaaagtgaaggtctgcccatgggccagctgcacgtaggccactttgtagtctggtttcttgatcctcacattcttgtgatccctcctcctgttggagccatgctgcacccgtgtgcgcacgctagccacgggaacattgtaaatctgctcaaggtaattccgaaggtccaccctggtcatctccatggggatccggaactgcacggtatcttcaggctgtgcagtaccaggccgcaccagctgaatgaagaagttagttcgaaatacacggagctgggggccacccagttggtaaagggggtacaacacattccgcgggatagtcga

SEQ ID NO: 2322 - DNA, 548 bp, Mus musculus
  misc_feature (1)..(600): n is g, c, a or t
gcggaatgtgttgtaccccctttaccaactgggtggcccccagctccgtgtatttcgaactaacttcttcattcagctggtgcggcctggtactgcacagcctgaagataccgtgcagttccggatccccatggagatgaccagggtggaccttcggaattaccttgagcagatttacaatgttcccgtggctgccgtgcgcacacgggtgcagcatggctccaacaggaggagggatcacaagaatgtgaggatcaagaaaccagactacaaagtggcctacgtgcagctggcccatgggcagaccttcactttcccagatctttttccagagaaggacccccgttctccagaacctctggaagaggagctaccccagcagaggcaaagcagcgacctgaggtgccctggtatcccttcctggtttggcctatgacctatgacagcaggatttggaccacagaccctagtgagcacagtggttctgacaagcccaaataaaaattctttgtggagaaagaaaaaaaaaaaaaaaaagcgcggccgcn

SEQ ID NO: 2323 - DNA, 548 bp, Mus musculus
gtgggtgcagcaaactttattgatggtattcaagagagtagggaaggctacctaggcccctcctgttattatgggggtctggaacggaaattgtgagggagatgttcagtgttggatgccaagctgggatagggactcctcagcaacccgtgggcctctctcttactctcagtgtccttgctggggtgggtggtccagggtttcttactccttggaggccatgtaggccatgaggtccgccactccgttgctatagctgtattcattgtcataccaggaaattagcttgacaaagttgtcatcgagagcaatgccagccccagcatcaaaggtggaagagtaggagttgctgttgaagttgcaggagacaacctggtcctcagtgtagccgagaatgcccttcagtgggcactcagatgccggcttcaccacctttttgatgtcttcatacttggcaggtttctccaggtggcacatcagatccaggatggacacatggggggtaggaacacggaaggtcatgccagtgagcttcccaggatagtcga

SEQ ID NO: 2324 - DNA, 569 bp, z
gggaagctcactggcatgaccttccgtgttcctaccccccatgtgtccatcctggatctgatgtgccacctggagaaacctgccaagtatgaagacatcaaaaaggtggtgaagccggcatctgagtgcccactgaagggcattctcggctacactgaggaccaggttgtctcctgcaacttcaacagcaactcctactcttccacctttgatgctggggctggcattgctctcgatgacaactttgtcaagctaatttcctggtatgacaatgaatacagctatagcaacggagtggcggacctcatggcctacatggcctccaaggagtaagaaaccctggaccacccaccccagcaaggacactgagagtaagagagaggcccacgggttgctgaggagtccctatcccagcttggcatccaacactgaacatctcctcacaatttccgttccagacccccataataacaggaggggcctaggtagccttccctactctcttgaataccatcaataaagtttgctgcacccacaaaaaaaaaaaaaaaaaaaagcgcggccgctct

SEQ ID NO: 2325 - DNA, 843 bp, Mus musculus
  misc_feature (1)..(850): n is g, c, a or t
gctgaggtcacaatgcctttattagtgtgtcgggacatggtggggatgggggtctcagcagtcacacagcataatgcctgaggcccccatgactggtttctaaggcacaggtacagtggccagtgctgctctccctgggaagggttgttgcttggggcagccgagaggcagtccagctttccaaagatccttcatggccctgtcagcttcttttgtgcaacctggtagctttctgtcggtagatctcagcagtgaagggctcttcatataggagagcaaccacgtagacaattgccaccagcaccgtcaacagcaggcctgtgggactagcatgcatgagtgcccagcctaggtagttggctgtactgccccagtacatggggttatccagcacgctgaagggaaatgtggtcactctggactccttgaggatcccaaagtagtcacctagaaaggtcccagtgaaccccagtgcatagaagctggacagcacaaacacgaatccccaacctaggaatgcaaggcccaggaagtaggtggtgtggttgtccaggccctccatcttgggctggctcatcatagcctgtgtgaagcagtgggagcggaggatgttcaaaagcaggatgcagatgcccagggaatagcaggctaggtggggggagccgaactnngctcagcttccgagttctctgctcccatctcgctaccacattccagaagagtgggttgaacacaatggtgatcacagccgccacaaagctgggctctgtggggtcatgtaaccagcagcagctcataacgagagatcagcagtcggcagccttcgcactgtgaatggaatcc

SEQ ID NO: 2326 - DNA, 583 bp, Mus musculus
tgctagatccttggatttccattcacagctgcgaagggctgccgactgctgatctcttcgttatgagctggctgctgggttacatggaccccacagagcccagctttgtggcggctgtgatcaccattgtgttcaacccactcttctggaatgtggtagcgagatgggagcagagaactcggaagctgagcagagccttcggctccccccacctagcctgctattccctgggcatctgcatcctgcttttgaacatcctccgctcccactgcttcacacaggctatgatgagccagcccaagatggagggcctggacaaccacaccacctacttcctgggccttgcattcctaggttggggattcgtgtttgtgctgtccagcttctatgcactggggttcactgggacctttctaggtgactactttgggatcctcaaggagtccagagtgaccacatttcccttcagcgtgctggataaccccatgtactggggcagtacagccaactacctaggctgggcactcatgcatgctagtcccacaggcctgctgttgacggtgctggtggcaattgtctacgt

SEQ ID NO: 2327 - DNA, 833 bp, Mus musculus
acagtactggaattaatttgtttttatttttaaatttttacttattcaatttacatcccactcactgcccccttccccctctaatgtagaaattttaaaaacaagacagaagatggcctgcacatagtttcaaaacatcaactgtgtgatttcaaagattccacccgagtctttgcttccaaacctggtaacattcattaactacaaaatgttattctttgcttagcatagctctcagtagcttatccccatgacttggaaaagagaaaactgaaggtgggactaagtcctctgtgtcccaaagtgtcaccagaaactacatagcttcccgtggtgatgcatggtgaggtttgagtagggaaagatacctcctgtcaccctgcaattggaagcagcacacttgcggggggcggggggcttggggtgtgatttttatttccccctttcctcaaccagtttaaaaaaatacaattaacatgggaacaaggatcccatttttttaaaaagaaaaaatatatataatcaacagagggcaaagcacctcctggggtgtacttacatatttacagggaggtatagcgtggcctcagagagttgtgtttaaaggcagtattacaaaatatacaaaggtgctcttttcacagtacataaaagaaccctgcctcatttccaaatgagacactataaaacaaatcactatttactatgtataagttatgaagtatgctgtacagatgcatagctataaatatggcacatagatggctctttggggacttttatctacagaggggctcagttggcatctccactcttctatggcgagagcatga

SEQ ID NO: 2328 - DNA, 588 bp, Mus musculus
ctctcccatcatgctcttcgccataggaagaggtggagatgccaaactgagcccctctgtagataaaagttcccaaagagccatttatgtggcatatttatagctatgcatctgtacagaatacttcataacttatacatagtaaatagtgatttgttttatagtgtctcatttggaaatgaggcagggttcttttatgtactgtgaaaagagcacctttgtatattttgtaatactgcctttaaacacaactctctgaggccacgctatacctccctgtaaatatgtaagttacaccccaggaggtggctttgccctctgttgattatatatattttttctttttaaaaaaatgggatccttgttcccatgttaattgtatttttttaaactggttgaggaaagggggaaataaaaatcacaccccaagccccccgccccccgcaagtgtgctgcttccaattgcagggtgacaggaggtatctttccctactcaaacctcaccatgcatcaccacgggaagctatgtagtttctggtgacactttgggacacagaggacttagtcccaccttcagttttctctttt

SEQ ID NO: 2329 - DNA, 526 bp, Mus musculus
atattttaaactcaaatccagcattgtaaagtttgtacaatttgtcctgaagctttgtgtttggctgcacctgcataagctgctacaaatagaataaagaattcatagcctgtatctatcatttagatgcatggaaaaatgggctttgcacacaatgggtttgaagctgactgggaacaatggaaaaaaattacattagccatggttgtaaagttttttggcttttttttaaaaccattttgtgaaaggtttctgaaacttgataataaaaagcagttggtgtaaattattctgtgtcacatttttagaaagaacatattttgaactgtaaaagtatccttacactgaggagtgaatctttaaacagcctctaaaaacccatcagcctgaggcttttgccttgggtacctgcccattttatagttaaataacactaatgttggttgaaacaggctttattcacttcagttgatgctctgtagcatcaaaaacatccaagttacccaactcctagattacctgcata

SEQ ID NO: 2330 - DNA, 482 bp, Mus musculus
aaattaaatgatctttcttatatacgcatccatctttcatcaaacacaagatgcttctttgactatttacattcagtatttaacttctacatctatgtatttatttaaactctgtattgtagtaaaatatgcattgttttaattcgtgggggtttacttcctggcaacagttggctgacgctcatggaggctgctgggcgctacgtgagggctacggtgagaacacaaccggtctactcttagcgctgcgtctgcgcagtctgtctacagaagctacctgggggttgaggggagggtgaagcgggcctggctgcggaggaatccccattgcagcagtgcggaaggcaaggctgctgccaggcacgttgtcggagtgggagtgcagagtccctgcctgcagtcaccggtcctgggctcatggatcccagctcccgcggtctgtgctctccagggagaggctcttggtcttttgggatagtcga

SEQ ID NO: 2331 - DNA, 505 bp, Mus musculus
  misc_feature (1)..(505): n is g, c, a or t
aaaagaccaagagcctctccctggagagcacagaccgcgggagctgggatccatgagcccaggaccggtgactgcaggcagggactctgcactcccactccgacaacgtgcctggcagcagccttgccttccgcactgctgcaatggggattcctccgcagccaggcccgcttcaccctcccctcaacccccaggtagcttctgtagacagactgcgcagacgcagcgctaagagtagaccggttgtgttctcaccgtagccctcacgtagcgcccagcagcctccatgagcgtcagccaactgttgccaggaagtaaacccccacgaattaaaacaatgcatattttactacaatacagagtttaaataaatacatagatgtagaagttaaatactgaatgtaaatagtcaaagaagcatcttgtgtttgatgaaagatggatgcgtatataagaaagatcatttaatttanaaaaaaaaaaaaaaaaaaaaaagcgcggccgc

SEQ ID NO: 2332 - DNA, 810 bp, Mus musculus
cattgatgagctgtttaatgtgaactgatatatttaaaacaaggatccagggtagacagggagaatgttttagtagaacatggcacagatgaaagttaattaatacccactagcacctcacatgagccagaaagacagagtaggcaaaacatcacagaggagaaaccaagcacatggataaggaccctggcagggagccccactgtcccagatccgctcgcaaggtcgttcttgtgcactcagtctggacagtgtctggaagggaacaaaacagttctaatctgaagccgaggctccagtgccagcagccagcctcttcactccggctggggtcatctgccatgtggctggggactgagtatgcttagctgggacaccaaagctccttccaccctttgtttctctagaaggaaccctcccccaatttcagcagtggattctggaagctttgaagctatttaactcagaaacatgaagtaaaagcagactctctgaacttaaacaatcaatcaaatggacaggcagactcataaaaataaaaccaagcgaccagttcattagccagttagttaagtcaacatctgaatgaagacatttatacaacatccacaagacacaccagcagagagccactgctggcagctgggaataaacagctatcctgtccttccagcacactgtattgctaccagagaatgcaggccatacgctgaagtttagagactcttccagttggcaaaggaccccgagccatggtcagcctagtgtgtgtacaggtctatgggagacaagacttacactctcaagtca

SEQ ID NO: 2333 - DNA, 596 bp, Mus musculus
gttaatgtcagatgttccagagtgcctagacccgagaggaaaacagcatatttggaccttcctatgcagagatcataatgtacggaaagaaccgagggagcttaggggatcgtgacttgagagtgtaagtcttgtctcccatagacctggacacacactaggctgaccatggctcggggtcctttgccaactggaagagtctctaaacttcagcgtatggcctgcattctctggtagcaatacagtgtgctggaaggacaggatagctgtttattcccagctgccagcagtggctctctgctggtgtgtcttgtggatgttgtataaatgtcttcattcagatgttgacttaactaactggctaatgaactggtcgcttggttttatttttatgagtctgcctgtccatttgattgattgtttaagttcagagagtctgcttttacttcatgtttttgagttaaatagcttcaaagcttccagaatccactgctgaaattgggggagggttccttctagagaaacaaagggtggaaggagctttggtgtcccagctaagcatactcagtccccagccacatggcagatgaccccag

SEQ ID NO: 2334 - DNA, 456 bp, Mus musculus
ggaaaatgaagtgtttttattgctatgtttgcagtggcttttttagcacagtaagaatgtccccaaaggcttgcacccttacccagccccacctctctggcttagtccagctctgtgtgaaggaagcctttctaagggctacttggctgtttcaggcttgatgggacacagatgtgggtttaagctgctacacggaagacttgagatgtcgaaagtacatcagccttttagcttggaggtgggagccatgcccaggatccctttcccgggctttgtccatgggaaatccctgcaatcctgcccagggagctgggtgtgggcaagtctgagcatgtcaggtgagcagacccagattccctggaacagtgttacagccttccgtcccacagacttagaggcaaaggagcagtgtggggacaccattgaggctcccactttcccactccggatagtcga

SEQ ID NO: 2335 - DNA, 473 bp, Mus musculus
gagtgggaaagtgggagcctcaatggtgtccccacactgctcctttgcctctaagtctgtgggacggaaggctgtaacactgttccagggaatctgggtctgctcacctgacatgctcagacttgcccacacccagctccctgggcaggattgcagggatttcccatggacaaagcccgggaaagggatcctgggcatggctcccacctccaagctaaaaggctgatgtactttcgacatctcaagtcttccgtgtagcagcttaaacccacatctgtgtcccatcaagcctgaaacagccaagtagcccttagaaaggcttccttcacacagagctggactaagccagagaggtggggctgggtaagggtgcaagcctttggggacattcttactgtgctaaaaaagccactgcaaacatagcaataaaaacacttcattttccaaaaaaaaaaaaaaaaagcgcggccgca

SEQ ID NO: 2336 - DNA, 698 bp, Mus musculus
gctagtcaaaactaagtcagatttttatttttccatagaccacatcatttaataataaaaaaataaaaataaaaattgaacaaaaggaaaaggtggctataaagtggaaccagcgggcaagagactgcaggccagagaacaggggactgcaggggcctgggactcaggagaggctgattcagctcataggtgacccagtcctggccccagctgtccccaaaaggctgagtaccaagggaggcggaacgcaggatggagggaaaatgagcgtgggacactggttattcccacgtacggccacatcttcccttcatagcctagctcttccctctcagacttaacaggaagaaaggagagggccaagttccaagagttaggttggggaacagggagattgccactgctccatttgatatgaggggacgcgtggcagttatagttcagcactgagcaatggtgtgagacccttggttccagggtggtggtgactgtacctatccctctgcggcctttgacctcccaggaccaagtggcaggtacctgcagctctctagtgttttcttggctagcggcgcccaccccggtcccgtacaggtgtgcttcgactccggcttctgctgtggcgcttggtgtctctgcgatccctctccctgcctcggtctcggtctcgctccctctcccgctctcgggatagtcga

SEQ ID NO: 2337 - DNA, 548 bp, Mus musculus
gagagcgggagagggagcgagaccgagaccgaggcagggagagggatcgcagagacaccaagcgccacagcagaagccggagtcgaagcacacctgtacgggaccggggtgggcgccgctagccaagaaaacactagagagctgcaggtacctgccacttggtcctgggaggtcaaaggccgcagagggataggtacagtcaccaccaccctggaaccaagggtctcacaccattgctcagtgctgaactataactgccacgcgtcccctcatatcaaatggagcagtggcaatctccctgttccccaacctaactcttggaacttggccctctcctttcttcctgttaagtctgagagggaagagctaggctatgaagggaagatgtggccgtacgtgggaataaccagtgtcccacgctcattttccctccatcctgcgttccgcctcccttggtactcagccttttggggacagctggggccaggactgggtcacctatgagctgaatcagcctctcctgagtcccaggcccctgcagtcccctg

SEQ ID NO: 2338 - DNA, 654 bp, Mus musculus
gaaatcactggcaagctacaatttgaagctctgactgacctaaaatagtctagtaaaaaagtactcaagtgtgcataatatgacatataatctaatgcataccaggagctctggaggcccatcttctgcatctactgctgattgatcttctccaattttacttaaatcccacacattcaggcggcgatcagtaccacttgaggccggaatagtttcattatgtggagaccagtggacctggaaaatttcatccttaagcgattcaaaggtgtggagatttagtttcagattacgcaggtcccataaagctacagtcttatctgcagagccagttgccagaatgaactcgctgtagggattgaatgagaggcagttgacctcaacggtgtgtgcatccaccaaatggctcggcttagaagtggtattggatcaggcgtcccatatcaaaagtatctgatcatcagcaacagatccaaacaaggactcatgcagcagatgccaggcaacatcctctacaacagctgagtggccagtaaacattactttagcatccacaattttgccttccataggtcctgcaattatatcccacaagcagacagtatggtcatcagaggcactcaggagatgcccactcagattagggatagtcga

SEQ ID NO: 2339 - DNA, 590 bp, Mus musculus
taatctgagtgggcatctcctgagtgcatctgatgaccatactgtctgcctgtgggatataaatgcaggaccaaaggaaggcaaaattgtggatgctaaagcaatctttactggccactcagctgttgtagattttgtggcctggcatctgctgcatgagtccttgtttggatctgttgctgatgatcagaaacttatgatatgggacaccagatccaataccacttctaagccgagccatttggtggatgcacacaccgctgaggtcaactgcctctcattcaatccctacagcgagttcattctggcaactggctctgcagataagactgtagctttatgggacctgcgtaatctgaaactaaaactccacacctttgaatcgcataaggatgaaattttccaggtccactggtctccacataatgaaactattccggcctcaagtggtactgatcgccgcctgaatgtgtgggatttaagtaaaattggagaagaacaatcagcagaagatgcagaagatgggcctccagagctcctggtatgcattagattaaatgtcatattatgcacacttgagtactttttta

SEQ ID NO: 2340 - DNA, 943 bp, Mus musculus
  misc_feature (1)..(1000): n is g, c, a or t
caacacacaggattgataacataggcatatgggtggcatgaatcaattaaaaaactttactttttatgccaggaggggaaaaacaataaatacaaggtgctaaaataagcattaagaatttggttggtaaggtgtgggaaggctcccctgatactgatctgtctcagcaaaccacacacacacataaacggcacaaagtatgattgaggtggtgagattttaaaaaacaagacaacataattcaggttaactgcactgaacagtgaataaatgaaatccatctacacctgaatgaacatgtttaacaatcaaaaaattttaaacaaccacaaaaagtaaaaacttccaacaaacacaaacaggatttgtctaaagggcacacagtcgccctgcagaggaccccgcctttactggtgtgtcttctggtgagacaagagacagagacaggctggactggttaacagggcgacaggacagtcatacagtggagcgctgtagctggctaggccccctgggttccactgcagagctggctttgtgcgtaggaggcacatggataagggtgagtcaggcagacattattcaaaagctactctgccagtaaccattggataacgctgggaaagctttgggctttgtattttatttttatttttaaattttatttttttaagttttactccttgtatttaatttttaaataacaaggccactgaaactcatgcacgctgcaaaaaacctcatgcagtagttaggtaaaccatccaagcagtttttattcattaatattcataaatacacacagcagcttcattagagatttcaattttcctcttcagtttgaatgtggagtattaggagagccttttgcatgtcaaggtacagaaagcagagatcaccctgcactgctacctacatttacctgctangagtaaaaattagt

SEQ ID NO: 2341 - DNA, 593 bp, Mus musculus
gatgatcggggggagatggcagattttggtgctatgggctgtgtagatattatgcctttagatgttgctttagaaaacctaaatttaaaagagagtaataaaggaaatgagcctccaccacctcctctttgatgacctccccactcgaagacaatgtcctctgtgctgtatttgccaatgaaagtggacaacagctatcctgggtttgtgtggtgattgtaatttcaggtctgtcactcttgttacattgtgtacattcaaaaggaagagagaaatatatatgataatcatttccacttaactaatttttacttctagcaggtaaatgtaggtagcagtgcagggtgatctctgcttcctgtaccttgacatgcaaaaggctctcctaatactccacattcaaactgaagaggaaaattgaaatctctaatgaagctgctgtgtgtatttatgaatattaatgaataaaaactgcttggatggtttacctaactactgcatgaggttttttgcagcgtgcatgagtttcagtggccttgttatttaaaaattaaatacaaggagtaaaacttaaaaaaataaaatttaaaaat

SEQ ID NO: 2342 - DNA, 615 bp, Mus musculus
  misc_feature (1)..(615): n is g, c, a or t
gacagtgactgtttattgcgcatcacgacaccgcagactgtccaaaactaaatggatacagtctgccacactgtacagaatgcttcactgtcaactgtgaaggttagaaagatgaacaagttctgtttgcagttttcataaatacattgatttctgaaaaatattaatactatattgtatgaaaatctaaaaaaatatgattagaaggaaaaaacattacattgattatacataaaagaattaaaaataatgagtttgtgggtttttgaagctagactcttcctggggttactggcaggcagaataactaggaaaaagagaacacttattcttttttaaaaaaatagtgtttgtataatagttattttataatcctccaaaacactgtttctagagtcagaggtctattgattgcccattaaaataagtatcaaatgtctatctgaggtactccagccaagcatagcgacattgcactgctgtcaccaccagcaaaggtgaatggcaggttggttctaagagagaaccaggaaaaggaaaactactggtgtacagnacaacataagtatgtagattaacaaagaaaatgtaccttttacattaatcacacagggc

SEQ ID NO: 2343 - DNA, 598 bp, Mus musculus
tgtgacctccatggaacccatcaaagttctctgatggtgtttgagtcagcgccctgtgtgattaatgtaaaagttacattttcttttttaatctacatacttatgtttttctgtacaccagtagttttccttttcctggttctctcttagaaccaacctgccattcacctttgctggtggtgacagcagtgcaatgtcgctatgcttggctggagtacctcagatagacatttgatacttattttaatgggcaatcaatagacctctgactctagaaacagtgttttggaggattataaaataactattatacaaacactatttttttaaaaaagaataagtgttctctttttcctagttattctgcctgccagtaaccccaggaagagtctagcttcaaaaacccacaaactcattatttttaattcttttatgtataatcaatgtaatgttttttccttctaatcatatttttttagattttcatacaatatagtattaatatttttcagaaatcaatgtatttatgaaaactgcaaacagaacttgttcatctttctaaccttcacagttgacagtgaagcattctgtacagtgt

SEQ ID NO: 2344 - DNA, 631 bp, Mus musculus
gctgcttccacaattcaaaaccaattctatgaaaatagcattgtcaagaacgcagagcagtctctccttagctgaggaaaggaggtgccaattaggcacgtgctgttcaaatggttccaaacttcgcttctcaagaggcagtccagccagtgccggcttctgaacgcacgcacgggtcctgggaacgctcgtctagtctatagacattttagtgaaatggggtgaaagttcacatctgcgttctgtcgccgtgggctcatctgaaactcctctgctgctgcatgaggcccacgttctcatagactcgggcgctgtcctccctcatttctgcacagggtggcgttggggtgcagggtggcaggggactctgatcaccacttgtctggtccaccaaggaatacttaatattggtatattcatgtccttttcttttgcttttctgctcctcctcgatccggcgctgcaggtctctatgtagtgctggacagccatgtagataaaccggtactgtgcttctgtctggaccatccccgacctctgggaccgcaccatctgaatggttttaggaacgtcgatgtcacagtccacacctttctctcgaatgatgtcaataaggatgtcaatcacaatg

SEQ ID NO: 2345 - DNA, 600 bp, Mus musculus
tcgagctcaagtacccgctgaactgtgcagaccctacctctgaaaggtggttccatggtcacttgtctggaaaagaagcagagaagctgctgacggagaagggcaagcatggcagcttcctcgttcgagagagccagagccaccccggagacttcgttctctccgtgcgcactggtgacgacaaaggggagagcaacgacggcaagtccaaagtgacccacgtcatgatccgctgtcaggagctgaaatacgacgttggtgggggagagcgctttgactctctgacagacctggtggagcattacaagaagaaccccatggtggagacgctgggcacagtcctgcagctcaagcagcccctcaacacaactcgtatcaatgctgctgaaattgaaagccgggttcgagagttaagcaagctggctgagaccacagataaagtcaagcagggcttttgggaagagtttgagacgctccagcaacaggaatgcaaacttctctatagccgaaaagaaggacagagacaagaaaataaaaacaaaaacagatacaaaaacatcctgccctttgatcataccaggggtcgttctgcatgatggg

SEQ ID NO: 2346 - DNA, 542 bp, Mus musculus
cagtatctaagagagtgtttactgttttgatttaatcaaacgtaaaatattccatcaaattacccaggaaaatccaggtagcagaaatatataacatatccatttcttcacaaggtctcaaatctgttttacaaggccatatatatatgtatatgtactatgccatttaaaccacttccactttctatactgaagaactccagtatagaaataagcttcgtggtgttgaggtaacattgggacactcccccaacatgactgcataggtgtttaaggttaaatgtgaacatgatgtgaggtctccagtcagtcaatcccattagaatcgccggttaaaagcagcatatttgacaagtgcccaaggagataacttcactgaacccatgtgtgtgtgtgtatgtgtgtgtgagagagagacagagagagagagagagagagagagacatagagagtgtgagtgtgtgagtgtgtgtataaggagatgggtagattcaaggaagactgactgaaggcatactgatagctgttagcatctgcagttg

SEQ ID NO: 2347 - DNA, 577 bp, Mus musculus
  misc_feature (1)..(577): n is g, c, a or t
atcgataagtatggtgcggacgccctcaggttatatctgatcaattcccctgtggtaagagcagaaaacctgcgcttcaaggaggaaggtgtgcgggatgtcctcaaagatgtgctgctcccgtggtacaacgcttaccgcttcttcatccagaacgtctttaggctccacaaggaagaagaagtgaagttcctatacaacgagcatacagtcagagaaagccctaacatcaccgaccgctgggttctgtccttcatgcagtcgctccttggcttctttgagaccgaaatggcagcttacaggctgtacactgtggtacctcgcctggtcaagtttgtagatattctaacccaactggtatgtcccgaatgaacaggaggaggttaaagggtgagagtgggnntggaaagactgtgtcatggctctggagacactgttcagtgtcctgctttctctgtgcagactgatggccccttacacgccctttctgactgagctgatgtaccagaatctaaagctgctgattgatcctgcttctctccgggacaaggacacactcagcatccactacctcatg

SEQ ID NO: 2348 - DNA, 540 bp, Mus musculus
cctggccacactttattgtttgccttgtttcactttcccttgatcatccactttcttaatggctgcctggatggcctcctggttgcccaggaactggtgaggcccaacggcacgcaggttctcatccaactccagcagaatcggaactccagtgggcagagtgatgttgataatatcctcgtctgagataccttccagatgtttcaggagagctctactgctattcccgtgagcagatatcagaatgcttttgccctttaagatttccggagcaatcctttccttccagtagggaagaagtctctccagaacatccttcaagctttctgaacgtggcagttgatccaagggcacatcgcacactttgtacctccggtcactgtagatctcgtggaagtagggatgagactcctctataggaggtggggtcacgttgtagcttctcctccagagccttacctgctcttcaccatgattcaaagccattttctccctgttgaggccaatcaaggctccatagtgacgctcattcagacgcca

SEQ ID NO: 2349 - DNA, 564 bp, Mus musculus
gagagggccaatggaataaggagaaccgattctgtagttgggtggaccagaaacttaacaacgacggactggaggaggctcggaactgtgggaggcagctcaaagctctcaacttcgagtttgatcttgtcttcacatccatccttaacaggtccattcacacagcctggctgatcctggaagagctggggcaggagtgggtgcctgtggagagctcctggcgtctgaatgagcgtcactatggagccttgattggcctcaacagggagaaaatggctttgaatcatggtgaagagcaggtaaggctctggaggagaagctacaacgtgaccccacctcctatagaggagtctcatccctacttccacgagatctacagtgaccggaggtacaaagtgtgcgatgtgcccttggatcaactgccacgttcagaaagcttgaaggatgttctggagagacttcttccctactggaaggaaaggattgctccggaaatcttaaagggcaaaagcattctgatatctgctcacgggaatagcagtagagctctcctgaaacatctgg

SEQ ID NO: 2350 - DNA, 882 bp, Mus musculus
ctgtgtcattcctatatacttttattataaaaaataaataaggataatttcaacatgttttaaatttatacagtatttttaagaaaaaataggcaaagaaatctattagtaatatattgatttttaaaggtctcagctgttccttcaaggtgatccaggagtcaaggccacctgagtgtaggctgtgtcccacgtggccacattatctcagatgcacagagatagagggcagctgaggggcaggagtcttgccttgtgcttctggaacttttaggccacacgtactgaccagggtctcactgactcctactaaaatccagctggagcattttgggacagaccctgaaatctcacaaaagcaggatttaacacttcctttccattatgtaagcacgtctcaccaagctgtgccacaggttacactgtgtcctccatgcacagctcagtgcacggcagggtaaagaaacagcctctgccttgggtctgagtcggcagcagctcctctgctcagtcctcagactgcttcgctccttcccgtgccagtctgtcggcctcttcattgcccacaaatcctgagtgaccaggaatgtgcatccactggatgtccatgccctgagtgagctcgtccagctccatgaagtcctccttgttgatcacatctttccctgtacttgttctccagccattcttcttccagccctgaacccagttagttatcccattgatggtgaacatgctgtctgtgtacagaaccagcttgctgatgttctgagccttggcttgcatgatggccttgcaggaaggggtggcctgggcccagtaaacgccaattcctgctcgtgcccgcttccgtccattactggagcaacagccatccgtgta

SEQ ID NO: 2351 - DNA, 519 bp, Mus musculus
ggagagtcagtcgttgtctacacggatggctgttgctccagtaatggacggaagcgggcacgagcaggaattggcgtttactggggcccaggccaccccttcctgcaaggccatcatgcaagccaaggctcagaacatcagcaagctggttctgtacacagacagcatgttcaccatcaatgggataactaactgggttcagggctggaagaagaatggctggagaacaagtacagggaaagatgtgatcaacaaggaggacttcatggagctggacgagctcactcagggcatggacatccagtggatgcacattcctggtcactcaggatttgtgggcaatgaagaggccgacagactggcacgggaaggagcgaagcagtctgaggactgagcagaggagctgctgccgactcagacccaaggcagaggctgtttctttaccctgccgtgcactgagctgtgcatggaggacacagtgtaacctgtggcacagcttggtgagacgtgcttacataa

SEQ ID NO: 2352 - DNA, 348 bp, Mus musculus
aatttgtacagcaaagtatttatttcgtatgtgtaaatataaacatttaaataaaaatagtgttgtaacatggcatgaacaaatctagttcagaataacattcacacacaatgggaagtctcctttactgagttaaactattaaatattttcaaaagaaaagacatgtcatatttatataaggggtacaggtaaaagatgtgaggaatgtttaagatacagtatatagctctatgctaatgtcaaaaaattcatactgtcagaaactgttgctaagtattacataatcaacatcattttcacctaacacatggctaaatctccacaactttgagtagcggatagtcga

SEQ ID NO: 2353 - DNA, 374 bp, Mus musculus
ctactcaaagttgtggagatttagccatgtgttaggtgaaaatgatgttgattatgtaatacttagcaacagtttctgacagtatgaattttttgacattagcatagagctatatactgtattttaaacattcctcacattttttacctgtactttttatataaatatgacatgtcttttcttttgaaaatatttaatagtttaactcagtaaaggagacttcccattgtgtgtgaatgttattctgaactagatttgttcatgccatgttacaacactatttttatttaaatgtttatatttacacatacgaaataaatactttgctgtacaaattaaaaaaaaaaaaaaaaaaaaaaaaaagcgcggccgcc

SEQ ID NO: 2354 - DNA, 807 bp, Mus musculus
ggatatatattttatctttcttaaagataaacagccaagttcttgaaaattgacagaaatgtcttatctatctttctttccatttccataggacacaccaattttataagcctttgtgagagaggagttagtttctgcacgcttgcaaacctggttgccaaatttattcaagtcaacctggtgcaccgtgtaggttgctagctttgaaattcacaatggttctgtaactatagcaaagtgtacatcttaaacagtaattatgtatttataagacagactccttcagagtgatgctgtgctctgaactctaacaaaatctacttgagataatccgcaatcctgatgctgtctaacaatttggtcctaaagcttcacattttagaaacagacaaaagaaagtctgccattcaaagaattttctgagtattgcagaacatcaggaatttgacagaactgagaagacacctatgtgagaaaatcacaggggcctgggagagactaggacaccttgggaagattgtagaatgaatggcatctttccagaactttatcaactgttcccacaacccaagtctacttttccaagtcacacaagtacttggaataaccctgaagttctccttcagagtgtaaaggctccagagtgtaagcaaagcttcctaaaacaagaagcctctattaacaccatgaatcagactcgttccaagtctcttcttagaaaaaaaaagagactagaaaaacaaagtcatgagaaattcacatgcaggtaacacatgaaaataccaaaagcacaaaaacctcaaaaat

SEQ ID NO: 2355 - DNA, 500 bp, Mus musculus
ggtttgcaaataataacaacaaaaaagctttgtttagtctttgttttgttttccaggacaaaaacaagcttccctaagcttgaatttatagttataaaatgaaaacaaaaccaaaaaaagaaaaaaaaaaaaggcaagacacaagaaaaaaaaaatatcctgggcaataaaaattactttaaaccagctccagagccgctcttttcctaagcctcctgtgccgccttcagtttgtaggaggcagcctgtgtgagtgacagacaggaaacagaagagtagaacatactggcagagttttacattaggatattgctgtcttttctacgatagagaatctttatttgtaaggaatgtttcaggcctagacatacatgaaacttatttttgaggtttttgtgcttttggtattttcatgtgttacctgcatgtgaatttctcatgactttgtttttctagtttctttttttttctaagaagagacttggaacgagtctgattca

SEQ ID NO: 2356 - DNA, 888 bp, Mus musculus
gaaaagaatggctttaatcattattaaatgtgcagtgggaaggagtgtgcttcagatagtctgggcagggctggcggcaggcaggtcactcctgctgccacagctgcagacactagtttgtacatgacaagacaatgagggaaagcagtccctttcaaacaaactggaaaaaaaattgttcacagtggtttgtatcaacagaatgcatttatgacaattacatgtagagactcacgcactctaaggctctctttatatcctaaagaaaacaggcatttacattattcatgacttatactaaattaaaaaaagatcaattgtacactttctcctcagacaggataacctgccagggtgtacagcttaacaccatcatcagagctgtccacaaagggaacagaggttcaaaacaaaatgctctcttgagaatgaagtgcttggcttgctgctataaccagcaagtgccagcagtaatcaaatggaggagggcccgacagacaggtctacctgggcaagctgaccagcacatcacagtttaaaaaggaaggttatgaacgctatgtcacaagtcccaaccaggcagtgtcaagtgacatctatttctttgcttgctttgtgatcataccccgtggtggtgtgacaggtctcgtggcgttgggcttctttttctctgcaggctttaaaatctggaaggaacacatgagggtctcatccacactcatcatggcgcctgcattgtcaaactcgccacagtagttgggtgcagaaaacagagtgactaactgcctctttgcaaaaaactcatagccatcttcaaccacctgatgggctctacatataagatccaatcatgcttatgggagaattttgcaccacttctgcaccaaa

SEQ ID NO: 2357 - DNA, 585 bp, Mus musculus
gaaccacgagtgcgccagcatcaataggatctacggattttatgatgagtgtaaaagaagatacaacattaagctgtggaaaacgttcacagactgttttaactgcttgccgatagcagccatcgtggacgagaagatattctgctgtcatggaggtttatcaccagatcttcaatctatggagcagattcggcgaattatgagaccaactgatgtaccagatcaaggtcttctttgtgatcttttgtggtctgaccccgataaagatgtcttaggctggggtgaaaatgacagaggagtgtccttcacatttggtgcagaagtggttgcaaaatttctccataagcatgatttggatcttatatgtagagcccatcaggtggttgaagatggctatgagttttttgcaaagaggcagttagtcactctgttttctgcacccaactactgtggcgagtttgacaatgcaggcgccatgatgagtgtggatgagaccctcatgtgttccttccagattttaaagcctgcagagaaaaagaagcccaacgccacgagacctgtcacaccaccacggggtatgatcac

SEQ ID NO: 2358 - DNA, 790 bp, Mus musculus
ggcctgtcaactgaaaattaggattcagaagtacagctggtggtactttccacaaaagctttatagatctgtgagttcaagaatcttgggaaagaatctctgtgcattagggtgtagatctgaagctgggcgtcttcatacatgtgtgggctggggtccagcagactcctgttgatcacctctctaactcgagaatccaggctgacctctttcggtgacagtatagaaatgtaatcctcgtatatcatcctggccttttcttcaacagcctttttgttctgctccttctttaagtcttcacaggccagccagaagagtaggttctcttcactgtactccgttcggaggaactctcggaaaaggtttcttcctgcaggagtcttcatcatcttgtcaaaattctgagaccaggacaagacttcatctgcagtggggttttggcattcctctaggacctggatgctctccattttggtggtatgtggggatctccccgaagagtctcctctttcctcattcctgacagtgaggcaggagcagctgcagcaacagcaccagcagaagcagcaggtattgttgggcctttggtttccaggcgcttgagacacagcctgtgttccttcattttgtgactgctgccgttttctcatgtcagctgcttcagaacccaactgccgggtagacttagatgtgggcgagactccggggtccgggtccgagggtgctcgagagtgggctgctccgtcctctagcggacaggctccgtgccatccgcccaacggatagtcga

SEQ ID NO: 2359 - DNA, 544 bp, Mus musculus
ttgggcggatggcacggagcctgctccgctagaggacggagcagcccactctcgagcaccctcggacccggaccccggagctctcgcccacatctaagtctacccggcagttgggttctgaagcagctgacatgagaaaacggcagcagtcacaaaatgaaggaacacaggctgtgtctcaagcgcctggaaaccaaaggcccaacaatacctgctgcttctgctggtgctgttgctgcagctgctcctgcctcactgtcaggaatgaggaaagaggagactcttcggggagatccccacataccaccaaaatggagagcatccaggtcctagaggaatgccaaaaccccactgcagatgaagtcttgtcctggtctcagaattttgacaagatgatgaagactcctgcaggaagaaaccttttccgagagttcctccgaacggagtacagtgaagagaacctactcttctggctggcctgtgaagacttaaagaaggagcagaacaaaaaggctgttgaagaaaaggccaggatgatatacga

SEQ ID NO: 2360 - DNA, 835 bp, Mus musculus
agaaagacattttctttttttctccctttttaaaaaagcgcatacatttattaagaatttgaagttattaaaaatgtattaaggggagtattataaattcagaagtccttagaactaggcacagaagaatttaggtttcaagggattccttccagtttcctattgcattcctcattgctctgagctttaggatcccctgccctggaaccctggcagctcaagaacccagaacagatgggggaggctctgctgcacctgcaccaaattcagacagctggacatccagtcagtgtgtgtagcgttttctgaagttctctggagtgatggggaccatttcctcacttagcagcgaaaagctacatgggcccctttcaaatgctggccccatcacaaacccagaactccatgtagcatgcaggtagaaatgtctctaggctggaggacttcctcagttcttatccaattacccagaattgttccttagagggttcacaggtaggtaggtaagatcgctttaaaaattttaaacttataaacgtttccagataaaaaagatggctgttgcaaagaagcctgacagaaaagcctgaatcagcaatcttctccagaagccgagcggtaaaggattcttgaagaagcggcaaaagccatcccagccgccgagagcctccagcctggcgcggtgccgacgccccatgagcagattatacagaaagttcactatgagacagcagtctcgggtcactatgacacgattccccagatccctcttctgcttgacagccatgtaagggccttgattcataagtgtcccgcgaggccaggagcatcacca

SEQ ID NO: 2361 - DNA, 338 bp, Mus musculus
gacgctctccttgtaccaggtgcaagtgatattcccaaatgtccaggtgggtcagagtgggaagtagctgagcctagaaagcctactgaggttggaccgggtgcaggagccaaaggatggccgactcgcaggacccactgcatgaacgcactagacggctgctgtctgactacatattcttctgcgcacgggagccggacaccccagagccaccgcccacgtctgtcgaggcggccttgcttcgctctgtgactaggcagatccagcaggagcaccaagaatttttttcctccttctgcgaaagccggggcaatcgcctggagctggtgaaacagatg

SEQ ID NO: 2362 - DNA, 719 bp, Mus musculus
gagaacttcaaacattcagtttattaaactaaggctagagaagccatagcatgaaaaagaactgcagtcattcaggacaaagttgaggattttataaagccaaatcaaaagacttaagacatgggaagattcttaagtgtaaggaagtaataaaacacagaaagtgaccacaagaattacaaatatatttgggtctcagacctgggaaatggactatacacagccttctaggggaagagacgccttagatgttctgacagcactgcacctttggcttgttctcagtggtgggcggaacatgaataggaaccacattgttgcttggagacatgtcattttcacgtctgtctgacatttgcttctgagaaacaatgcggtatatctctgttagaattgtctgaaaagcagcttcaacatttgtagaatctagagcagatgtctcaatgaatgacaaaccattcttctctgcaaaagctcttgcttcatctgtaggaactgccctgagatgacgtaaatcactcttattgcccacaagcatgataacaatgttactatcagcatgatctctcagttctttcagccatcgctctacattttcatatgtgagatgcttagcaatgtcataaaccaataaggcacctactgctccacgatagtatgcagacgttatagccctgtaccgctcctgccctgctgtgtcccatatctgggatagtcga

SEQ ID NO: 2363 - DNA, 588 bp, Mus musculus
  misc_feature (1)..(588): n is g, c, a or t
agatatgggacacagcagggcaggagcggtacagggctataacgtctgcatactatcgtggagcagtaggtgccttattggtttatgacattgctaagcatctcacatatgaaaatgtagagcgatggctgaaagaactgagagatcatgctgatagtaacattgttatcatgcttgtgggcaataagagtgatttacgtcatctcagggcagttcctacagatgaagcaagagcttttgcagagaagaatggtttgtcattcattgagacatctgctctagattctacaaatgttgaagctgcttttcagacaattctaacagagatatacccgcattggtttctcagaaagcanatgtcagacagacgtgaaaatgacatgtctccaagcaacaatgtggttcctattcatgttccgcccaccactgagaacaagccaaaggtgcagtgctgtcagaacatctaaggcgtctcttcccctagaaggctgtgtatagtccatttcccaggtctgagatttaaatatatttgtaattcttgtggtcactttctgtgttttattacttccttacacttaagaatcttcc

SEQ ID NO: 2364 - DNA, 400 bp, Mus musculus
gccatctgaacaaaagcaatgatttattggtactggcaacaaataaaagattaacagtttccgaagagaatcaagcaattatccaggagctgcaagtctgactgcagtaagtcttccagtgtctttgtaccctaatggctttccccttttttgccaaccactcgtctgaagtcattcatatttgttgcctggactggagtaccaatgaaagtaaaatatgaaattctcgttgtttcttcttctccttgattagactgaacaaataaagttacactgttgacattctgaaatttaacataacgaagaggaacaatgccatcttctttaatgtcatcttctgtcagttccagagcttgagttggctcacccctttccgcctcctcaaaatccggatagtcga

SEQ ID NO: 2365 - DNA, 438 bp, Mus musculus
  misc_feature (1)..(438): n is g, c, a or t
gattttgaggaggcggaaaggggtgagccaactcaagctctggaactgacagaagatgacattaaagaagatggcattgttcctcttcgttatgttaaatttcagaatgtcaacagtgtaactttatttgtttagttattcaaggagaagaagaaacaacgagaatttcatattttactttcattggtactccagtccaggcaacaaatatgaatgacttcagacgagtggttggcaaaaaaggggaaagccattagggtacaaagacactggaagacttactgcagtcagacttgcagctcctggataattgcttgattctcttcggaaactgttaatcttttatttgttgccagtaccaataaatcattgcttttgttcagatggcaaannnnnnaaaaaaaaaaaaaaaaaaaaaaaaaaaaaaagcgcggccgc

SEQ ID NO: 2366 - DNA, 817 bp, Mus musculus
acagcttgaaacacaacttttattagaaaagttatacataacatagcatcgactattttcaagaacaatattaaacccaataagcgacaaaaactggactaacaaaatgtttaacaagaaactaacgacctttctataatcaaacattcaattatctacagtgtctttttacaaaggggacatccatggttacaggcacgtcgtattgaaaagaaaactgcaagagcaattttatacaattaccattctcgagaaactgaatcattaaagtagtaattacgagttcacaaatttaaaatatttcacataattttaaattactgggtatacatggaagccttagttttaaaactgatttcccccccataaaagtgccaacacttaagctagaacttttcaacataattttgtcctacaaagtgaacatgttttgatatttatatagtcacataatttctggtgctatctggtctgttaataataaagcctttattaggatgtttttctccacttaaattataggaaactgatacaggattatagttgcaaagttattaaaaataagttgcaaatacaggagtgtgcagccttggaaaaagatgagtacgaacatttataataaatatcagagaagccattagtttttacagcactgtttgcttaaaggaagtcaatctggggtagtctctcattggtctgcccttcagcaggcaggggaatgtctgcttccatgatctcattattcaagcaaacatccaaacacctctgagagtgatctgcagcccctgaggagtcacgccactgtagacgtctgatc

SEQ ID NO: 2367 - DNA, 420 bp, Mus musculus
ttcggctattatgttctgaaatcattccgtgagtcttaggacctctgatgctatgcaccgcagctcagaacgatcagacgtctacagtggcgtgactcctcaggggctgcagatcactctcagaggtgtttggatgtttgcttgaataatgagatcatggaagcagacattcccctgcctgctgaagggcagaccaatgagagactaccccagattgacttcctttaagcaaacagtgctgtaaaaactaatggcttctctgatatttattataaatgttcgtactcatctttttccaaggctgcacactcctgtatttgcaacttatttttaataactttgcaactataatcctgtatcagttccctataatttaagcggagaaaaacatcctaataaaggctttattattaacagacc

SEQ ID NO: 2368 - DNA, 662 bp, Mus musculus
agaaagaaatgaaatatttttctttactgcaaattattttcaaatagtcatgtttccagtgtcattacaaaaagactctcaggagaaatctgggccctttaaagtgaaagaatggtattaacttacaaaaaataaatacatatattgccacctaaagaaaaaggatgcttctctgggactgacattagagccaaaattcaaagcaagtatgaactgtggctggcatcaagttcttgctaaccatgggggtctctctttggtctgtaactcacacaacctagaggaccactttgaagtattcagactgaggatcaagtgcagagctgggcatggctgctccctgaatctagtaccttctcccagacatcaaattcttgggactatccttctccacgaaacgatgctcataagtaggggggagaaatcactgatatttgtgaatggttctcttctggccctataaggaactctggctgtctttgataccagattcttgcccgtgggaccatcccttctgctcttgacttttgctgcttataactattcatagaccttatgtgaggagtgagccctccccagctttgaacaggaagaaacagaaagcaggggcaaggtgtaagtccttgtgaagggagtgttgcctggccgggttggatagtcga

SEQ ID NO: 2369 - DNA, 547 bp, Mus musculus
acccggccaggcaacactcccttcacaaggacttacaccttgcccctgctttctgtttcttcctgttcaaagctggggagggctcactcctcacataaggtctatgaatagttataagcagcaaaagtcaagagctgaagggatggtgcccacgggcaagaatctggtatcaaagacagccagagttccttatagggccagaagagaaccattcacaaatatcagtgatttctcccccctacttatgagcatcgtttcgtggagaaggatagtcccaagaatttgatgtctgggagaaggtactagattcagggagcagccatgcccagctctgcacttgatcctcagtctgaatacttcaaagtggtcctctaggttgtgtgagttacagaccaaagagagacccccatggttagcaagaacttgatgccagccacagttcatacttgctttgaattttggctctaatgtcagtcccagagaagcatcctttttctttaggtggcaatatatgtatttattttttgtaagttaataccattctttc

SEQ ID NO: 2370 - DNA, 359 bp, Mus musculus
cgcttttatcggcaccatgatcgagtacgacttttacatctatgccaccgctgcggcgctggtattcggtcaactgttcttcccctctgacgataaattgttcagcaccatggccgcatttggcacccttgccgttggcttttttgcacgaccgttgggcggcgtggtgttcggtcatatcggcgaccgcatcgggcgcaagaagtccctggtgattaccctcgtgatgatgggcgtggtgacggtgtgcatcggcctgttgccgacctatgcgcagatcggcgctgcggccccggtgttgctgattttgctgcgcgtggtgtagggcatcgcggtcggtggcgagtggggatagtcga

SEQ ID NO: 2371 - DNA, 356 bp, Mus musculus
cactcgccaccgaccgcgatgccctacaccacgcgcagcaaaatcagcaacaccggggccgcagcgccgatctgcgcataggtcggcaacaggccgatgcacaccgtcaccacgcccatcatcacgagggtaatcaccagggacttcttgcgcccgatgcggtcgccgatatgaccgaacaccacgccgcccaacggtcgtgcaaaaaagccaacggcaagggtgccaaatgcggccatggtgctgaacaatttatcgtcagaggggaagaacagttgaccgaataccagcgccgcagcggtggcatagatgtaaaagtcgtactcgatcatggtgccgataaaagcggcggccgc

SEQ ID NO: 2372 - DNA, 454 bp, Mus musculus
cttatttctatgaaatcttttaagataatttataaaagggtttaaatataatcacaccatcattgatttaataaagctcctctctccgagatctagagactgaagaggcacttgctgttcgcagacagataaggcgctatgcggtcgtctatttctttctggacacagttcactgcaattctcatttgtcagactcctcctcctcaaattccactaaaggtgcatgtctgttggcttgggctccttcactgaagaataccttctttatcctgccatcctttggagcctttatggtatgctccatcttcatggcaatcataaccatcagagagtctccagcttttactctgtctccagctttcacaaacaccttttcaatggttccagtcatgggcgcgatggtgcccccctgagctccttctgcactcactggagacaagtactggatagtcga

SEQ ID NO: 2373 - DNA, 480 bp, Mus musculus
  misc_feature (1)..(480): n is g, c, a, or t
gtacttgtctccagtgagtgcagaaggagctcaggggggcaccatcgcgcccatgactggaaccattgaaaaggtgtttgtgaaagctggagacagagtaaaagctggagactctctgatggttatgattgccatgaagatggagcataccataaaggctccaaaggatggcaggataaagaaggtattcttcagtgaaggagcccaagccaacagacatgcacctttagtggaatttgaggaggaggagtctgacaaatgagaattgcagtgaactgtgtccagaaagaaatagacgaccgcatagcgccttatctgtctgcgaacagcaagtgcctcttcagtctctagatctcggagagaggagctttattaaatcaatgatggtgtgattatatttaaacccttttataaattatcttaaaagatttcatagaaatgngaaaaaaaaaaaaaaaaaaaaaaaaaaagcgcggccgc

SEQ ID NO: 2374 - DNA, 496 bp, Mus musculus
acctcaaacattttataataaatagcaccgcacacagtaccatccccaaagtattactcctcactggcttactttatcccaacaattaggggtatccaaggtcagaggaacccaagaacttggacacagcactttttaagggacagcggggactgatggaaagcttgggtcttcaaaaccttacagcaaagccccctttaccctccagtcctgagacagcaaatcctgtaattctccttcgtcgtcactgtccacattctcctcttcctttttctgaagttcttttatggtcaaaacctctttaagtttgttttttatttcatcctggcgattccgagcttttccactcggcggtaacattctatctgctcatcaatctctccaatctgccggtccaaccgtccctcctcatcctcttcagcaacgatcgcttcagagatagtgttgacttgcctcatagccttttgaaactcgtcccactctttgggatagtcga

SEQ ID NO: 2375 - DNA, 512 bp, Mus musculus
aaagagtgggacgagtttcaaaaggctatgaggcaagtcaacactatctctgaagcgatcgttgctgaagaggatgaggagggacggttggaccggcagattggagagattgatgagcagatagaatgttaccgccgagtggaaaagctgcggaatcgccaggatgaaataaaaaacaaacttaaagaggttttgaccataaaagaacttcagaaaaaggaagaggagaatgtggacagtgacgacgaaggagaattacaggatttgctgtctcaggactggagggtaaagggggctttgctgtaaggttttgaagacccaagctttccatcagtccccgctgtcccttaaaaagtgctgtgtccaagttcttgggttcctctgaccttggatacccctaattgttgggataaagtaagccagtgaggagtaatactttggggatggtactgtgtgcggtgctatttattataaaatgtttgaggtaaaaaaaaaaaaaaaagcgcggccgc

SEQ ID NO: 2376 - DNA, 592 bp, Mus musculus
gaagagttagcaatcttttatttgcttttcttgctgattcatgctgctttgtccctgaaaatcagagttcaagtgattcattgtccagtttcctcacgttattcttggtctccacctccttgcatcgacttggctccctttttcagctccatctgcccacgtgtgtgaccctgacgagtaggaaactcacgatggaatgggggaagctgccgcagaaaccaaacgctgtcgttcaacctgcttcttcttggtcacttcggttatatcttcttcataaatgacagagccatgccatttgacatataaataccacacacaccccaatctcactgaaatgatcgtgagacaacagaaaatgtccatgctcagagtccatcagtactctgggattccggtatagagaagagacttagcatctccatctccagtgggtgcaggttgccccctgtaatgaccaaagaatgcagtggttctcccaagctcactgtgcacatctgctgtaacgtgcctgctgcaattttctgatcttcagctcccactctggctaagcgacacagagtgtcctcagtgattgctggttccggatagtcga

SEQ ID NO: 2377 - DNA, 575 bp, Mus musculus
gaaccagcaatcactgaggagacactctgtgtcggcttagccagagtgggagctgaagatcagaaaattgcagcaggcacgttacagcagatgtgcacagtgagcttgggagaaccactgcattctttggtcattacagggggcaacctgcacccactggagatggagatgctaagtctcttctctataccggaatcccagagtactgatggactctgagcatggacattttctgttgtctcacgatcatttcagtgagattggggtgtgtgtggtatttatatgtcaaatggcatggctctgtcatttatgaagaagatataaccgaagtgaccaagaagaagcaggttgaacgacagcgtttggtttcctgcggcagcttcccccattccatcgtgagtttcctactcgtcagggtgcacacacgtgggcagatggagctgaaaaagggagccaagtcgatgcaaggaggtggagaccaagaataacgtgaggaaactggacaatgaatcacttgaactctgattttcagggacaaagcagcatgaatcagcaagaaaagcaaataaaagatt

SEQ ID NO: 2378 - DNA, 558 bp, Mus musculus
ggctggatggcctcgtcttttctccactcatgaagagctggccatttgtcttccctgagtcttgactttgccctcaacccaggtgtgagctaagccagtgggagtgtgcagccacagaccagcaaagtcaacatttccgtgaaattcctggggctgacaacagcatgcaaagaatcctgatggcccctggccaaagctgctgtgccctggccatcctgctggcaattgtgaacttccaacatggtggatgtattcatgtcaccagctcggcatcccagaaaggagggcgactggacctcacctgtactttgtggcacaagaaagacgaagctgaggggctaatactcttctggtgcaaagacaatccttggaactgttcccctgagaccaacttagaacagcttagggttaaaagggatcctgagacagatggcatcactgaaaagtcatctcagttggtgttcaccatagaacaagctacaccatcagacagtgggacctaccagtgctgtgccagaagccagaaaccagaaatctacattcatggccactttctct

SEQ ID NO: 2379 - DNA, 678 bp, Mus musculus
aaaacttgcttattttattgtgtggaggggaaacattattctgtggtataaaacatacctggcattcaaggactatacatcagcaacatttgcaaaacgttttctttattggcaccgaggtgggagaagccaacctcgctctggcagtcaggaaggagatccagaggtataccaactgttctgctagattcttgggatttttttgttgcctggggtggaggcacggcacccagtggagatcagaggacagcctgtgggagtcagttctctccctccaccatgtgggtgcacgggttggacctgcaatgtggcagcaaacacctttacccttgaccgtctggccggccccagtgttcagagtatatccgttttatggacccggcttctctgcgcattgtcagatttacctcgctgtaccttcctctgaagtctttttttctctctgtcacaaggtatatagagcttgaagggccacaggctggtgaccaacatcccccaagcctttacttgcaggaagcctgaactgagagtgccgttgatatggctgaagtcagggtgtgacctttgtctctgtcttatctctgtgtggttccctgtgactagaacggagagaaagtggccatgaatgtagatttctggtttctggcttctggcacaaactggtaggtcccactgtct

SEQ ID NO: 2380 - DNA, 677 bp, Mus musculus
  misc_feature (1)..(677): n is g, c, a or t
ctatgttaactgcttaatttatttagtctgcttcatggcctagtgcaggccccactcccacacttgctggggacagtgcaagcatactcagtcaaggacgctgaaccatgcccatcgggagttcaggattccctctgcagcaagtgtgcaaactccacacgcaagtacagtctacacagcaagaaaagtggccaaagacttcccatcccataattcatttcgtctatgtacaaaatatctcacatatcaccccagagataaaagctaataacagcaaccactcttcctgaacccccccaccagtacaacccatcacatgtatttataaccaaacccattcccaatttgttaaacatggcgtgagtcccgcttagatgacaaaccttggtgagctacagagtccctggacacctggcagccaggggtagaaagtgcccccatagttgcccatgcccatggccctcgagtgtggctcaggaagcaagctggaccagcaacaaaaagaggtagaatctacaaggcccagctcagggtgttcttttcctatctcagtttggggactcagcagccaccaatgcctgtcccacattgctgcctggcccagacattctagaggatgtgcagtagctgccacaagggtgcaaangaattgatgggacccccttctctctgcttag

SEQ ID NO: 2381 - DNA, 546 bp, Mus musculus
  misc_feature (1)..(546): n is g, c, a or t
gccctgccctctaaaagccctgtatccaggctggtgggctcagtcaaaagctcagcatgttgcctaacagtacatgggttctggatgccagcctggtttgcctcagactttgggtctaagcagagagaagggggtcccatcaatttctttgcacccttgtggcagctactgcacatcctctagaatgtctgggccaggcagcaatgtgggacaggcattggtggctgctgagtccccaaactgagataggaaaagaacaccctgagctgggccttgtagattctacctctttttgttgctggtccagcttgcttcctgagccacactcgagggccatgggcatgggcaactatgggggcactttctacccctggctgccaggtgtccagggactctgtagctcaccaaggtttgtcatctaagcgggagctcacgccatgtttaacaaattgggaatgggtcttggttataaatacatgntgatgggttgtactgggggnngggggttcaggaaagagtggnttgctgctattagcttttatctct

SEQ ID NO: 2382 - DNA, 681 bp, Mus musculus
caaaaattgtgtatacaaagtcaggagctagataatgtagctggaaaagatacctcagctctgctccaggtccatcaccaagtagggatgtatttccttcaaggcctggaggagggagtccttgcaggtcaggttccaggatggaacaaagctgaagagcttcctcatcttgtcttggctggtggtctctgcacgaactgcctggtactgtccttcagtcagcacactgccatgcaaagcatccagcactccgtccacttctgtgaccctggcaatgagtgcttgcctgtgctggtccacaaagtgtcctgttctggctgtactctgagcagggacactggctgcagctgccacagctccagactcttctttagtcgtttgcagctgctcagccagctcctgtaagcccatgtctctaagcacagtcattgtgagctccaagccatacgactccagatagtagctgacaagtttgtcagtgagatctatggcgtccatctgcagcagggccccgcgtgggatgcgcccacagccttctcgcagttgcactgtcagcagcttcatcttgaactttttgagttcatcccctgacaagttttcaagagcgtccaggatggcatctcgtagccgccccatggctctggggtgggcagcgcggtcaccttttactcttgctgctgc

SEQ ID NO: 2383 - DNA, 554 bp, Mus musculus
gggctggcagcaggcaggctgcagcaggcgagcagcagcaagagtaaaaggtgaccgcggctgcccaccccagagccatggggcgggcacgagatgccatcctggacgctcttgaaaacttgtcaggggatgaactcaaaaagttcaagatgaagctgctgacagtgcaactgcgagaaggctgtgggcgcatcccacgcggggccctgctgcagatggacgccatagatctcactgacaaacttgtcagctactatctggagtcgtatggcttggagctcacaatgactgtgcttagagacatgggcttacaggagctggctgagcagctgcaaacgactaaagaagagtctggagctgtggcagctgcagccagtgtccctgctcagagtacagccagaacaggacactttgtggaccagcacaggcaagcactcattgccaggtcacagaagggacggagtgctggtgctttgatggcagtgtgctgactgaaggacagtaccaggcagttcgtgcagagaccaccagccaagacaagatgaggaagctct

SEQ ID NO: 2384 - DNA, 417 bp, Mus musculus
aaaataaaaaataaaaaaccagggttagtttttgtaggagtcttcgttcagtgtatcaagctctgccatggcctcatcaaaagccgttttagccagtgtgcaggcaagctctggattattaaggatctcatagtaaaatacagaaaagttaagagccagccccaggcggtttggttgcgtggctgcatctccttcttgcttatatcaaacgcctcttggtaggctccttgggaattttctattgtttgttttcgatcatcgccacaagctacttcagcaagataccggaaataatctcccttcattttcagatagaagaccttactctctggattagttgcattggctattaaatacttatccaacaattccaggaccgtggtgcagatggacctcagggatagtcgggatagtcga

SEQ ID NO: 2385 - DNA, 427 bp, Mus musculus
gactatccctgaggtccatctgcaccacggtcctggaattgttggataagtatttaatagccaatgcaactaatccagagagtaaggtcttctatctgaaaatgaagggagattatttccggtatcttgctgaagtagcttgtggcgatgatcgaaaacaaacaatagaaaattcccaaggagcctaccaagaggcgtttgatataagcaagaaggagatgcagcctacgcatccaatccgcctggggctggctcttaacttttctgtattttactatgagatccttaataatccagagcttgcctgcacactggctaaaacggcttttgatgaggccatggcagagcttgatacactgaacgaagactcctacaaaaactaaccctggatcttaactgttaataaaaaaaaaaaaaaagcggccgc

SEQ ID NO: 2386 - DNA, 562 bp, Mus musculus
  misc_feature (1)..(562): n is g, c, a or t
ggagtccagacagcaccagctgcaatgcacttatgatatttatttgagaaaggaaaaggagagaatgggaataaactggcaaaaagtgtaggagggaggggagagggcccgacccgacccgattgcgacggcaggtggcctgcagacagctgtcctggctagccagcacagctctgagctccagttgcaaggaattccaaggtctcgctcagggtcttgccgactccagaggtcagtgatcccagctcacactgcctctaccagctcagaagagaagtcctgcctaaggtcatgaaatagacctggctgctgcaccagagcggacggaggcaaagaacaccttgtcattgcgttcacacaggaactttagtctctgagcccttttgtgcataaatacaccatccaagtgaccagtttccacagatcgtatctctattgccttctctccccagcccattgtctgattcgaccggatatatgctacagatgtcggcatctctccccactgcagaaccacgtccttggtgatccttccgtacgtgttagaantaccccctcgtct

SEQ ID NO: 2387 - DNA, 565 bp, Mus musculus
aacacggatgggatggagctgctggtgtgctacgaagacgagggggtttacgttaacacgtacggaaggatcaccaaggacgtggttctgcagtggggagagatgccgacatctgtagcatatatccggtcgaatcagacaatgggctggggagagaaggcaatagagatacgatctgtggaaactggtcacttggatggtgtatttatgcacaaaagggctcagagactaaagttcctgtgtgaacgcaatgacaaggtgttctttgcctccgtccgctctggtggcagcagccaggtctatttcatgaccttaggcaggacttctcttctgagctggtagaggcagtgtgagctgggatcactgacctctggagtcggcaagaccctgagcgagaccttggaattccttgcaactggagctcagagctgtgctggtgcagccaggacagctgtctgcaggccacctgcgcgtcgcatcgggtcgggtcgggccctctcccctccctcctacactttttgccagtttattcccattctctccttttcctttctcaaataaatca

SEQ ID NO: 2388 - DNA, 622 bp, Mus musculus
caaaaataaataagatctttattaaagcagccctgaacatcaccttctaatgggtcacctgtccagaagagttaagcaagaggtcacaggatgactccccacacttccacctgcaacaccaagacacaggcttctttgcgtgtttttaattcagaggattcccgtttcctctcacctcacctggagatcaatctgaagcagcctcggatctaactaaagctctccacagacttccgctgagggggatgctaactctaaggcctccacctctctcagagaggcatgctgacttctggcatcagccgcctcttcagagcaccttctgccacgggacaggagaaggactcggtggcaccaggtgaacagatgtaagcagcttcacccccagacctgagcctgcccctccctgtactacaggggacagggacaccctacagagtcctcctcactccttcttgcttccctgggcggggtttcttgtaaggagtttccctgagctgggtggggccagcgtggacaccgtgggtgactccagcttcactctgtccagaagggtcttcttaagggcagcaggagacaccttttcttggtcagccatggactgcagttctcggatagtcga

SEQ ID NO: 2389 - DNA, 564 bp, Mus musculus
agaactgcagtccatggctgaccaagaaaaggtgtctcctgctgcccttaagaagacccttctggacagagtgaagctggagtcacccacggtgtccacgctggccccacccagctcagggaaactccttacaagaaaccccgcccagggaagcaagaaggagtgaggaggactctgtagggtgtccctgtcccctgtagtacagggaggggcaggctcaggtctgggggtgaagctgcttacatctgttcacctggtgccaccgagtccttctcctgtcccgtggcagaaggtgctctgaagaggcggctgatgccagaagtcagcatgcctctctgagagaggtggaggccttagagttagcatccccctcagcggaagtctgtggagagctttagttagatccgaggctgcttcagattgatctccaggtgaggtgagaggaaacgggaatcctctgaattaaaaacacgcaaagaagcctgtgtcttggtgttgcaggtggaagtgtggggagtcatcctgtgacctcttgcttaactcttctggacaggtgacccatta

SEQ ID NO: 2390 - DNA, 610 bp, Mus musculus
gtggttgccttacgaccggattcctttattgatattacctagacattttaggggttcttgctgttctaaatcccatctcagatactgtttgggatgaagatcacacctgaccctgagggaactagagcctttctatctgggtgtagttctgtggaggtgtggtccagctcctgctggcgtgtgtcagttccaacaggcaaggagcaccaaggacaagtggcaactcccaggcctagcctgggttaggctccctgggccctggctgcttcctcttgcaccgactgccatagtgccctgatgttgttctggccaaagcctgtggccccctgtctctgaatcagctccaggaagaaagtgtcttcggcgaagagggacttggtgaagacctgaagcaaaaattcgtctttatcaccatccagcaggattccctgccgttctagaaggccaggcttgtgccctgcggctagaatttgttcttctttgccgggctgctggtaataagcttcaggaggagtcagaagccggcatcccgccttcgccattccctcagaagcatctatgatgttaggagtgtacagtcctacgtgctgcaggcctggccccccatgcc

SEQ ID NO: 2391 - DNA, 564 bp, Mus musculus
actgcctaggctttcatcacttgccgctgagcccaggtgaggatccggagatgggcctcaaggtggctgcagggtctgggcgagggggactacggcttactgccttgcagactccgccgaataatactgtccccaccctcgtgctggcggagtccctaccgggactcaacagcaaacaggaccaggtagagcaatttctaacccggcatggggggccaggcctgcagcacgtaggactgtacactcctaacatcatagatgcttctgagggaatggcgaaggcgggatgccggcttctgactcctcctgaagcttattaccagcagcccggcaaagaagaacaaattctagccgcagggcacaagcctggccttctagaacggcagggaatcctgctggatggtgataaagacgaatttttgcttcaggtcttcaccaagtccctcttcgccgaagacactttcttcctggagctgattcagagacagggggccacaggctttggccagaacaacatcagggcactatggcagtcggtgcaagaggaagcagccagggcccagg

SEQ ID NO: 2392 - DNA, 344 bp, Mus musculus
aaatagttactcttctgccctcttgggctcttctataacacaagttacaaacctactgccaggtttctcccagggctcagctgctccccacctgcctgagacagaaagggaaggagaagccagaaaagtcccttctaaggggaaggaggctctggggttctgctcaccctgaaaggaggcagtgaaggtggctgtgcccttctcagggatgaaggttacgatggccccgctggagggcagaaggacacgtgttctgctcctcaagttgaccagggaatctgagaccacctcagagccccaaggttggaggcccctgaaatccactggtcaggacaccaatcatg

SEQ ID NO: 2393 - DNA, 522 bp, Mus musculus
gaagacagggcgaggatggtgccaccctggcctgtgcccagcagcttatccagacttatgagctcaatgagacagccaagcagcacgaactgatgacgctggatggcttcatgatgtatctgttgtcgcctgagggggccgccctgaacgtggcccacacgtgtgtgttccaggacatgggtcagcccctcgcccactactttatctcgtcctctcacaatacctacctgacggactctcagatcggagggaccagcagcacagaggcttatattagggcctttgcccagggatgccgctgtgtggaacttgactgctgggaggggccgggaggggaacctgtcatctaccatggccacacgctcacctccaagatcctctttcgagatgtgatccaggctgtgcgtgaccacgctttcacgtcgtccccatatcctgtaatcctatccctcgagaaccactgcgggctggaacagcaggctgtcatggctcgccaccttcgaagcatcctgggagacatgc

SEQ ID NO: 2394 - DNA, 504 bp, Mus musculus
ggattcagcactttattgataacagaaaatggtactttaagccccaagtctggagtggaagaaagcaccttgtttccctccaagccatcattgtcactcactgtcataccctgtctcctcccaggcccgggggtggggtggggcgcattctgggcttgtttggatttgaggacctattccagcaggtccctgcgatggctaatctgtcacaaagagtcaggctgggggtgatatttgaggaagatcttcttggagaggtccacggtgtcccctcggggctgactggggtacctcttcttgttgtaaacgaaagcctgctcgagtgggaaaacgttcttctcaaactcgtgctgttggaaggggacacctctggctaggctgtgagccagagtccccaagaagaggcaccagcgaggctggtagtaatcagccaccagtcctgccagttgcttattggcataatccaaaatgttgccctcgggcccccacagggtaatctggtag

SEQ ID NO: 2395 - DNA, 287 bp, Mus musculus
ggtctcccagcctgatgccgtggcagcttggaagctcctactcagaagtgtctacaactgctctggggaggcgtgcagtgggcacaatcgaagcccgttggtcaagcggccgtccctacagatgagtaccgctgtctggtacaacagatcagatgtgtttgaggcttggcgactgctgttaacagctgccccaaacctgaccaccagcccagccttccgctatgacctgctggatgtcacccgccaagccgtgcaggagttggtcagcctgtgctatgaggaggcaa

SEQ ID NO: 2396 - DNA, 555 bp, Mus musculus
aagattctggatgctttattctttgagaatataaaccactttgaatagcacccttgaagcgaacgtcttcaagccaccattatgaataacactgggaaataattgtaaagttctgagaatcatactcaacatttaaccctttaaaagctgctagctctaacaattaggttcaaatggaaatgctttaattttatattcacaaaatgaattgcaacatatcataatgagttttgctaatattcttttctggggtagggtaaaaatttctaatacaacttgatccttttgcctgctcaaaggagctattttagatcactattgtacaatagtggttttcccatgaactctcacaggctgtactcctgtgctgggtgtggaaggcactgatgtcagagaaattagcttctaaccgtgtgctttatccctctggcaattagaaagtattaaagtgcttgagaaatagactctataatcatgttcacagaggacttgcagcctacacatgtgccaacaaaactattttaacatcagagtaggatttgctttgattgaggc

SEQ ID NO: 2397 - DNA, 570 bp, Mus musculus
  misc_feature (1)..(572): n is g, c, a or t
tcccaagccaaagcccaacatctcaaagctgcgtcagatctgcagatagcagcatctaccttcacatcttttggcaaaaagctcaccaaggaggaagcccttcaccctgatacctttattcagctcgctcttcagcttgcctactacagacttcatggacgccctggttgctgctatgagacagctatgacaagatacttttaccacggccgaacagagactgtgcgatcttgtacagtggaggccgtcaggtggtgccagtccatgcaggatccctctgctagtctccttgaacgtcagcaaaagatgctagaagcttttgccaagcataataagatgatgaaagattgttcacatggaaaaggatttgaccgtcaccttttaggtcttttgctcatagcaaaagaggaaggtctccctgttccagaactatttgaggacccacttttctccagaagtggaggaggtggaaattttgtgctctcaacaagtttggttggttacttacgagttcagggntgttgtggttcccatggtacacaatggatatggatttttctaccacatcag

SEQ ID NO: 2398 - DNA, 239 bp, Mus musculus
gtcagtgctatggaagtctttattcatcatatttcccctcttgacttactgcccaggtgaggccaggaagagtccatacagagtggctattgccaaggtcaggagggtcagcaggctcagtggggccagcagcccctcctgtgatggggcttctgggaccttctctggaggaggactcttaggtcgcctgctcctgccattgctgggacttccattggctgtggccaggggatagtcga

SEQ ID NO: 2399 - DNA, 265 bp, Mus musculus
ctggccacagccaatggaagtcccagcaatggcaggagcaggcgacctaagagtcctcctccagagaaggtcccagaagccccatcacaggaggggctgctggccccactgagcctgctgaccctcctgaccttggcaatagccactctgtatggactcttcctggcctcacctgggcagtaagtcaagaggggaaatatgatgaataaagacttccatagcactgacaaaaaaaaaaaaaaaaaaaaaaaaaaagggcggccgc

SEQ ID NO: 2400 - DNA, 724 bp, Mus musculus
acatttaacctaattttattcatgcttgcctagggatgaggaatagatcattcaataaaaacatacagtaaaaacagggggtggggagggggaaggcttatcatgtacaatgtttaaactacaatagtgatgtaccttaattacttccatgcacacaagtctaacattacaagtttttaaaaaataaacaccattaagacttctaggagcattttataataaattcctaattttttctttgtagatagatcaagcacctccaaaatacagattcctatacacagtgagcactttacttaacgtacatggacagcctcaggacgagctgacgtctcggatcagctcggcaggcaacaaaccatagtgccaaatggaaagaagggcagttgcaaataaacttaaaactaagttaacttttataattaaatacagaaaatatactgatttgctaaaaataaataagatgtgatgtatttaacacttcactataaagaatgaacaccaggacatgtataaatggtggacgagtctcaatagttcactacgataaacgctggctagatagaagtgcatatgccgtggagcactatgggtgggttaggcttcgcacatacttttgttaccttgaggtagataacacatgtgtaccaaattcggcattcgttttcagttgctgctggtatcatgtgtcttaagaatgtgtacagatgaaaaacttgaaata

SEQ ID NO: 2401 - DNA, 576 bp, Mus musculus
acaagacatacagcagcattctgaaacatctgaactaaacctcagcagacatttctctttgttcttcatgaaatgcgttgtgtctttttttatcactaatgttttaagtctttttttttttacttgaatcagaaggtgtcattaatttgcaaggatttttcttggttctcagtttgtaaaacagacttttttttctacatgtgagttagttttcatttgaactggcatgtcgtttgcacacacacacatacatacacacacgcacacacacgcaaagaatagagcaaaacaatgcagtgcaggaggagacaagatgcgctaggatgattagacattctcatagaccagtgacctgctttacgggaaacaaaaccttgccttgaaacttacacagtgagactgtacataattgcatgaaaagatctatttttttcctgaaacatttttcattcattagtattttcaagtttttcatactgtacacatttcttaagacacatgataccagcagcaactgaaaacgaatgccgaatttggtacacatgtgttatctacctcaaggtaacaaaagtatgt

SEQ ID NO: 2402 - DNA, 742 bp, Mus musculus
ccgtttctaaattattttattttaaataaaaaataataataaagacctcacacaatagaaatgtagagattttgttcatgtcacattgacactggaactattaaagtgcaagttttgtgttttgtttttcttttggataattgcacacacacatgtaaacaagtcacttggctatgattgaacaccccccccccccacctccagccaaagtttccagtttgctgaggacagaggtggctgacagcggccatggcaacaccaatcacagacaagataatgccctattattagtcctgccctgaagcgagcaggacagttactttaagtctcacaggctgatgaacttcacacgctttttctcaaacctcttgagaaaaatgccaagcgcccctctgctgggtcctggcatcccagaatcggaggtgacagctcctgtcttagctagttctctttcctttcacagcaggtgactgtcccttactggcttggtctccccgggctgggtctcagggagggaaggagaaggccaattggcgctcctgtggcacggaccgctagtccaggaatccgatttgacttttgaacaaaaaaggtcctcaggttgtgtggctgaccctgggggctcctaactgatgacacagcgctccttgtccttagcctggctgccgacactggttttttcacgaatgtacatgaggtcgctgtgcacgctgggtctgcgagcaaagggcgcaagatgcca

SEQ ID NO: 2403 - DNA, 649 bp, Mus musculus
tgagtatcccggccaagaactgctacaggatggtcatcctcggctcatccaaagtgggcaagacggccattgtgtcgcgcttcctcacgggccgtttcgaggatgcttacacccctaccatcgaggacttccaccgaaagttttactcgatccgcggcgaagtctaccagttggacatactggacacatccggcaatcatccgtttcccgccatgcggcgcctctctatcctcacaggagacgttttcattctggtgttcagcttagacaaccgcgactcattcgaagaggtgcaaaggctcaaacagcagatcctagacaccaagtcctgtctcaagaacaaaaccaaagagaatgtggacgtgccgctggtcatttgcggtaacaaaggggaccgggacttctaccgggaagtagagcagcgggagattgagcagctggtgggtgacgaccctcagcgttgtgcctacttcgagatctcagccaagaagaacagcagcttggaccagatgttccgtgcgctctttgccatggccaagctgcctagcgagatgagccccgacttgcaccgcaagggtatctgtgcagtactggcgacgtactgcacaagaaggctctgaggaacaagaagcttctgcgtgcgggcagc

SEQ ID NO: 2404 - DNA, 518 bp, Mus musculus
aacagatgtaaactatttattgaatatttgccaccaaatattgttaaatacattatcttgcagcatatcgctttcaagttaaaatgtcagaaacaaacaccaatatttacagttcttgtaaggaatgttatataatgacacattaaggcgtaaattcttttggcttataattcttaaaagaatgataatagcaaaagtgatgcaaaatcttcattgtaagattatgattaagctacattttacaaaaatatggtgtaagatggcaataatcccattcaacatcctggattaggtccctccggagggactgataatttatacagtcaaactttaaaatttacagataaatgcagtttaatactgccactgagaagtacatctcttaacatatacaactttcaggccacagttttgaaggtctgaagtatcaagttggtttgatgaattagccggttggcacttatgaacacatttattgccttgccatctttaaaataagtcttcagagtgtcactgaa

SEQ ID NO: 2405 - DNA, 637 bp, Mus musculus
ggagttgaagagggctccaaaggtgggaagtgaagtccgtgcctcagttgccgattgctgttcttctttgtgtaccagtctttatcacatacacataaaaaagggaagaaattcggcagtgaatgaagattcctctgcattttagcattgctttttctactgtagttggcttttgaatgaggatgacaatggaagagatgaagaatgaagctgagaccacttccatggtttctatgcctctctatgcagtcatgtatcctgtgtttaatgagctagaacgagtaaatttgtctgcagctcagactctgagagccgctttcattaaggctgaaaaggaaaatccaggcctcacacaagacatcattatgaaaatattagagaaaaaaagtgtagaagttaacttcaccgagtccctccttcgtatggcagctgatgacgtagaagagtacatgattgagcggccagagccagaattccaggacctaaatgaaaaggcacgggcacttaaacagattctcagtaagattcctgatgagatcaatgacagagtgaggtttctgcagacaatcaaggatatagctagtgcaataaaagaactacttgatacagtgaataatgtcttcaaaaaatatcagta

SEQ ID NO: 2406 - DNA, 751 bp, Mus musculus
  misc_feature (1)..(751): n is g, c, a or t
cttaaagaagtcaaataatccccagggccatgattccaccagtggcctcagccccagacgcaaggccagaccctgaaggcacttgaatccctccacgctgctgactggatcccctggctgggctgggggcaggcttccaggaaaaggcttccaggaacgcaagtaaaggaaaaccgaaatgggtggaaatgaaccctgaataactgtgctccacacagagattcgggctgaaatgaccacgtgacaccacatctggggacagaaactgaggtgctagatagcacaacagcctatcgacacagatgttactgtgtttggacacgcagagcaccttggcagctctcggcgctgcctcacacactctttgagacattgagcttgctgagttcactggcctcttctactcctatgtcttcacagctgtccttttctatggctttgcaaatggaaacctttcctctgctttgactggctctctccaggacctcttagaggacaggcgagcttccttagcctgtgtgctatcatcagatcccagggaagccttgtccgaatactgaacggaaggcaccaagttggcaatctcatctgtgggagaccgcccaatgctgccgtccacctggactcggatgtctggggagatggacagctggtgctggggaacactccattgtccgtgcactttgggtaaaggtaggtcttcatctgccctttccccttgacattcacggntcctcggtagtcaagtcat

SEQ ID NO: 2407 - DNA, 523 bp, Mus musculus
ttcaagctcagggtcggctttaaccacggacccctcacagcaggtgtcataggtaccaccaagctgctgtatgacatctggggggacaccgtcaacatcgccagcaggatggacaccactggtgtggagtgccgtatccaggtgagcgaagagagctaccgtgtgctgagcaagatgggttatgactttgactaccgagggaccgtgaatgtcaaggggaaagggcagatgaagacctacctttacccaaagtgcacggacaatggagtggttccccagcaccagctgtccatctccccagacatccgagtccaggtggacggcagcattgggcggtctcccacagatgagattgccaacttggtgccttccgttcagtattcggacaaggcttccctgggatctgatgatagcacacaggctaaggaagctcgcctgtcctctaagaggtcctggagagagccagtcaaagcagaggaaaggtttccatttggcaaagccatagaaaaggacagctgtgaag

SEQ ID NO: 2408 - DNA, 20 bp, Artificial Sequence
  There is no sequence for this end of this clone.  This is a place holder.
  misc_feature (1)..(20): n is unknown
nnnnnnnnnnnnnnnnnnnn

SEQ ID NO: 2409 - DNA, 671 bp, Mus musculus
  misc_feature (1)..(671): n is g, c, a or t
tctgttacagttaggattggcactcaggataaatatccttttctacctgaaaataatttctgactttgacagcaggggctgtgggagccagaaggtctggagtattttagactaaggggccgtgggttctggaactccgtggtcgtgactaatctgaggagatagtggtggccttccctgtttctggaggctgtcgccctgtgctaatcttacattcatcatctagttcattcaggaggggcaaagtttacttgggcctctgccatttgtccagtccttcacctaaaagaaagaacgtagaattgctacagcatgcttgtctgtctgatcagacctttcctcttggtgacctctgtagatctattaaaaatcaccaacttgagaatcaagtttgtgaaactgcacaccttgggggataaccttttggactccagaatggaaatccgagagaagtactattacgctgtttatgatatggtggttcgagggaactgcttctgctatggccacgccagtgaatgcgcccctgtggatggagtcaatgaagaagtggaaggaatggtaagtgtctggggagagcttgtactggagatctgnngatgcaggcanaaaaaccaaaaaaaaaaaaaaccaaacanaacaaaaaaaaaaaaaaggggcggccgcttccn

SEQ ID NO: 2410 - DNA, 440 bp, Mus musculus
  misc_feature (1)..(440): n is g, c, a or t
aaaactacacctcattttcaaactattctctacaactttactgttttaaatgccacttagattctatttaggtaaccttcgttttaatctacaaggccgaccttcaaactagaaccttttagaacttcacaaaacctccctttacaatctcctaaactgctctggtcagcctccattatacagtacaaatacttttctcctcatttcctttttcaaactgtttaaataagccttcatgttatctcttaagatcttcttagattattaagactaagtaatatttcgataagctactctattagcttaagtttagagttctaattctttttactgctcaatctttttaattaaaaacttatctgcgatttcctcgggctgagtctcctgcctcacgagctcagctgtgctgctctacgctgctctgctctcggatagtcgan

SEQ ID NO: 2411 - DNA, 453 bp, Mus musculus
agagcagagcagcgtagagcagcacagctgagctcgtgaggcaggagactcagcccgaggaaatcgcagataagtttttaattaaaaagattgagcagtaaaaagaattagaactctaaacttaagctaatagagtagcttatcgaaatattacttagtcttaataatctaagaagatcttaagagataacatgaaggcttatttaaacagtttgaaaaaggaaatgaggagaaaagtatttgtactgtataatggaggctgaccagagcagtttaggagattgtaaagggaggttttgtgaagttctaaaaggttctagtttgaaggtcggccttgtagattaaaacgaaggttacctaaatagaatctaagtggcatttaaaacagtaaagttgtagagaatagtttgaaaatgaggtgtagttttaaaaaaaaaaaaaaagggcggccgc

SEQ ID NO: 2412 - DNA, 559 bp, Mus musculus
aatttttttatttacctgaaatcatgtctgtgcaatacctgttaccagcacagaaactgacctctatttacagactacagtcaaacatgcgctgtgagaagctgtgagcaactgaactgacgctgagcactttattacgataaatgcacacaatacttgtattgcaccaacatctgtctactgcttctgacttcattaaataagttacaataatacagtgtggaacagctggctgcacacctaaacaactgaagttaggactggaggcctatgttgtaaccattcagcagctgtagtgttttaaatgaatttataaataagcaaactgtacagggcccattagaaagcatgtttcaatgtcactgtagagcaatctggccacttacaactgaaggcatgcattacaattatcatacagttagagaggctatgacattttgcagagaaatgtggagacttggctgatggcttctgttcttggataaggtttcagaacctccttctcgcagcaaagaaaccaacttctctggagaggctctctgatttgttatgctaaatt

SEQ ID NO: 2413 - DNA, 645 bp, Mus musculus
ggaaatgtgtattaccagtggggttttagctgttcaatcaaaataataacaaatgtacaatttagcataacaaatcagagagcctctccagagaagttggtttctttgctgcgagaaggaggttctgaaaccttatccaagaacagaagccatcagccaagtctccacatttctctgcaaaatgtcatagcctctctaactgtatgataattgtaatgcatgccttcagttgtaagtggccagattgctctacagtgacattgaaacatgctttctaatgggccctgtacagtttgcttatttataaattcatttaaaacactacagctgctgaatggttacaacataggcctccagtcctaacttcagttgtttaggtgtgcagccagctgttccacactgtattattgtaacttatttaatgaagtcagaagcagtagacagatgttggtgcaatacaagtattgtgtgcatttatcgtaataaagtgctcagcgtcagttcagttgctcacagcttctcacagcgcatgtttgactgtagtctgtaaatagaggtcagtttctgtgctggtaacaggtattgcacagacatgatttcaggtaaataaaaaaattaaaaaaaaaaaaaaaaagggcggccgcc

SEQ ID NO: 2414 - DNA, 221 bp, Mus musculus
atttgcacgaggctttttgtgggactacagtcagtgattagcaaacacacaatatagtggtccaactctctaaagaacaatcactggacaaaccggataccctctcccatgtgcacaactctgcatggaaaagtattgaagtgcaggcttggacttgtggactttatttgtccttcctagtgtattaagaaaggacatgcattttaatttgcccgaagcaa

SEQ ID NO: 2415 - DNA, 538 bp, Mus musculus
cagatcaaagtggtgggactcgcgtcgcggctgcggagactagaaggaggactccggatccggctcggcgctcgctctcgctcgccatggagaagaccgagctgatccagaaggccaagctggccgagcaggccgagcgctacgacgacatggccacctgcatgaaagccgtgacggagcagggcgccgagctgtccaacgaggagcgcaacctgctgtcggtggcctacaaaaacgtggtagggggccgcaggtccgcctggagggtcatctcgagcattgagcagaaggccgacacctctgacaagaagttgcagctgatcaaggactattgggagaaaggggaagccgaacctgaggtccatcggcacaacggtcctggaattgttggataagtatttaatagccaatgcaactaatccagagagtaaggtcttctatctgaaaatgaagggagattatttccggtatcttgctgaagtagcttgtggcgatgatcgaaaacaaacaatagaaaattcccaaggagcctaccaag

SEQ ID NO: 2416 - DNA, 694 bp, Mus musculus
aaatatgaagccaaattttatgttttaaaaccacctccttgatctaacactgttagaactgaatgaattatccaatttgcatttaatttccctgtaacgtcacttggttcttggctactaacctttcatgttactcttggttttgtcagtttgcttgcctgtgggggtttgggcctgctgaccctgcccactggaagaggctgcctgctgggctgctttctgctttaacatcgtccaatcaaatgtgtagtcatattggtggttcagggtcctgaaaaggatgcggaatagctgcctcagatacatgtaatccggagcttcctcaaagcgcagccacgacagtaatttaagtacatggcaaattctgcaggaaaccccttacacaacacctcaacaggagtggacatcttcttttcactaatcttttcatatttttgtttctttgttgcagccttcagtccttgccacggcagactggttctattaaaatacatcaaaacatatcctaaagattccatgtcatctcggcgactctgctcaataccaagatgtgcattgatgctggcgtatcgggcagtgccagtgaggtttttatcttctctgtatggtatgtgttgccttgtcctgttgtctctgtactttttggccaaaccaaaatcaataaggaataacttattacagtgacgcccaatac

SEQ ID NO: 2417 - DNA, 591 bp, Mus musculus
cgcgggctggcccttcagcgagcggcggcggcggcgatccggcttctctctgccgcctgtgcgccccgtgacgccgacagagccttgggtttaggttgcccgccgcgcttctcacttctgccgcgggtggaacagccccggaggcttccatcctcttcctgaggtgtcggggctcggccccccgcctccatcttcgcgtctcaggatggcgagcagcagcggctccaaggccgaatttatcgtcggtggaaaatacaaactggtgcggaagatcggatctggctctttcggggacatttatctagcgatcaacatcaccaatggcgaggaagtggcagtgaaactagaatcccagaaggccaggcatccccagttgctgtacgagagcaaactgtataagattcttcaaggtggggttggcatccctcacatacggtggtatgggcaagaaaaagactataatgtactagtcatggatctcctggggcccagccttgaagacctcttcaacttctgttcaaggaggttcactatgaagaccgtacttatgttagctgaccagatgatcagtagaattgaatatgtgcatac

SEQ ID NO: 2418 - DNA, 714 bp, Mus musculus
agaaataaacccatttatcattaaagccatgtagcttaacacagctatgcagtggggcgaaatatgggggtggtaagagaggactctgtggggttgaagtctgggtcccccagtgtggtcagggaacaaacttattcctctggaagggcacatcttccataagtatgactgggaaggaaccagggctgctgctaaagccatggttggtgtgtagcgtcatcactgcagctcagccagggacacgaacttgcggatgtcctgggccagaagcttgggctcttcgaaggcagcaaagtggcccccacgttccatgtaggaataggagatgagtttggggtacttgaccttcacccacttttctggggcatgcaggatctcagaagggaaggctgaatagccagtgggcacaaagaccttcatcccctcatgtctatggaccatgacaccctggcccaagttttccttgtagaagcgctgggaggagacaatggttcctgtcgtccagtagatcatgatgttagtcagcagatcttccagggagaacttcctctccaggcctccatcctccagttcacggtattctgacttggtccaggtggagaacttctctaagatgtaggcagccaggcccacaggagagtcattcagagcacagcccacagtgtccggcttggtggcctggatgtgtaagtagccactctccctcatgatgtt

SEQ ID NO: 2419 - DNA, 318 bp, Mus musculus
tgggctttgtcatctactggtttgtctcccgggacaaggaggagaccttaccacttgaagatgggtggtggggcccagggtcaaagccatcagccaaagaagatgagagcatccggcccttcaaggtggaaacatcatatgaggagatcaaggacttgcaccagaggatagataggttccgggcatccccacctttggagggcagtcgcttccactatggcttcaactccagctacctgaagaaagtggtgtccttctggaggaatgagtttgactggaggaagcaggtggagatcctcaaccaatacccacacttta

SEQ ID NO: 2420 - DNA, 691 bp, Mus musculus
atttttcatgatagtgtaaactgaatccaattcctggcccccagagcaaacaagctaccttcagaggcaagaacatccaactgctgagatgcagcaatcccatcatgccctgcagctcaaaaaaaaaaaaagtgaacaggaagtggtcactggatattgctgctattactgccattgctgtccgtgccgttagtctctgaggcgagagctgtgttgatggagttaaggttggcgtcagagggcatggcgtctctgcgaggtggcatcctctcgttaattcggtctaagcccttggcctcctcgaagctagtgatcttatgttgtggtgaaaatcctttgatggcgctttgcagagtctgtttcccgccagagagcactccgctggggagcatgccagttggggtcaggcccttcagtgtcaggacactctcactctcttctctgagaactgagaacactctggccattttgcctattgctcggatcttgtttctgatgacttccttccgggctgcggccgtggctccgtcaaatccatcttcttctgaccccagttcatcgtcggagcagatgttgagaacattgaccagcatctcagtcactttctccccaacaaatggcagcgaccaggtgaaaacatccatgaaatttgggagccagtacggatgcggggagcagttgggatagtcga

SEQ ID NO: 2421 - DNA, 413 bp, Mus musculus
  misc_feature (1)..(413): n is g, c, a or t
catcacaaacaagatccgagcaataggcaaaatggccagagtgttctcagttctcagagaagagagtgagagtgtactgacactgaagggcctgaccccaactggcatgctccccagcggagtgctctctggcgggaaacagactctgcaaagcgccatcaaaggattttcaccacaacataagatcactagcttcgaggaggccaagggcttagaccgaattaacgagaggatgccacctcgcagagacgccatgccctctgacgccaaccttaactccatcaacaaggctctcgcctcagagactaancgcacgtacagcaatggcagtaatagcagcaatatccagtgaccacttcctgttcacncnnnttcncnnngagctgcagggcatgatagaattgctgcatctc

SEQ ID NO: 2422 - DNA, 443 bp, Mus musculus
accagtggtaaggacacgggttgaactgtttattgcggaaatatggtcaaggttccgtttacgtggctcccagtaaggaggtaccgagccttttggcctggagccgggtgggagagatgggagagtcagaggacgtctggccagggcctcagagttgggaggggatgttgggggccgggctgcaggtgaggcctgtgccatctgactccacgttcggtgccttcactgtgccgttgtctgtcgccatggagaaccttttcggccggcgattcccaaggggagacgccggggaatcgtccggtagtgagtctgtcgccttcccaggggctccggtggggtcagccgggggccgaaccttgccttctgcctggtgggctcgaccccgctcttcgatcgcagagacgtcattgacgctcagacaggccaccgcctgcgctcccttg

SEQ ID NO: 2423 - DNA, 580 bp, Mus musculus
tcctgggctgcaaagccagttctgtgctccgtgcatcgacgtgcttggcaggcagagcaggccggaaagaagcaggttgggagtgtggcggagcccgcagcttcagcagctccgcggtgaccatggccccgatcaaggtgggagatgccattccctcagtggaggtatttgaaggggaaccgggaaagaaggtgaacttggcagagctgttcaagggcaagaaaggtgttttgtttggagtccctggggcatttacacctggctgttctaagacccacctgcctgggtttgtggagcaagctggagctctgaaggccaagggagcgcaggtggtggcctgtctgagcgttaatgacgtctttgtgattgaagagtggggtcgagcccaccaggcagaaggcaaggttcggctcctggctgaccccactggagcctttgggaaggcgacagacttattattggatgattctttggtgtctctctttgggaatcgtcggctgaaaaggttctccatggtgatagacaacggcatagtgaaggcactgaacgtggagtcagatggcacaggcctcacctgcag

SEQ ID NO: 2424 - DNA, 141 bp, Mus musculus
caactttagaggtggggaaaacctgaaccttttctgcagaagttgaaatgtctgggctgtccccgccctctgtgtgtggtcacagtgactttacttggcaggatcacgaggaaaggaattgaaaacagggggggggggggt

SEQ ID NO: 2425 - DNA, 599 bp, Mus musculus
tgaatattgcaacccaaaattggggatgaagcactgtccaaggggagaagcactgtctgaggggagaagcactgtctgaggggagaagcactgtttgagggaagagaagaagcactgtccgaggggagaagcactgtccgagggaagaagcactgtctgaggggagaagcactgtttgagggaagagaagaagcactatcagaggggagaacactgtccgagggaagaagccagttgctacttccaggtctacacaggtaccaggtatttctgatcttcttaactcctttccctccgaattcagttttctcccttagagcttgatcccctaaaaccaccaggatgctttggtggggagaaataacagagaccaaaccaaaggactgaaagcaaaaaacaaacaaacaacaaccccccccccaaaaaaccccaaataaacaacaaccacaacaacaactaccaaaacccaaatgtgacacttccgggtaactgtattatctggagtcagaaccacagacacctctgtcaccaacctaactcaacagcctccttcctcagcgcccatcttgggaaagctgtaaaattgccccacaccccac

SEQ ID NO: 2426 - DNA, 699 bp, Mus musculus
aagcggagaatgatttattctggttcatggtgcaggaagaacagctcacaggagcagggagaggggtaggagagggtcacagttgcaatgacaagtgctggagtcacggcacacctagctcatagcttgtctcaggaaacagagcaagcagaagggtgttttggctacagtggtcaacacacctagcattctacagtcgccatatggaccccacctgccggagagcacacagctgcccaaaatagccatgagctgggaaccaaatatctgaacacatgagtctctaagtggtggtggtggggcagggggactttagctttagaaagggctactttgctaatgaaaaggaacggttagggattttaagagactgtgttgggcagagattggatgaccaaaaacgagagccggtgaggcttgggatctggaacaggatggaaggaaagaagaaggaaaagttggctgtggggctgcagggatcctgcctgcaccccagggctcctggcaaactcaggagatctggtatctttatcctacagcccaccctgtcaaggtcctaattgctgccccaagttgccatctttgtgaacatgggtcttgggaggaagcgactggtcttcatgtagtcggagatcttcttcaggccctcaaagcgcgctatgaagtccttcaggtttgggaacgcatccggatagtcga

SEQ ID NO: 2427 - DNA, 501 bp, Mus musculus
gatgcgttcccaaacctgaaggacttcatagcgcgctttgagggcctgaagaagatctccgactacatgaagaccagtcgcttcctcccaagacccatgttcacaaagatggcaacttggggcagcaattaggaccttgacagggtgggctgtaggataaagataccagatctcctgagtttgccaggagccctggggtgcaggcaggatccctgcagccccacagccaacttttccttcttctttccttccatcctgttccagatcccaagcctcaccggctctcgtttttggtcatccaatctctgcccaacacagtctcttaaaatccctaaccggtcctttttattaacaaaggaacccttttctaaagctaaagtcccccctgccccaccaccaccacttagagactcatgtgttcagatatttggttcccagctcatggctattttgggcagctgtgtgctctccggcaggtggggtccatatggcgactgtaga

SEQ ID NO: 2428 - DNA, 128 bp, Mus musculus
accaaaatggagaagggagttttacagttgtgagagtgcacagatgttctcattaaggcaatattgatccggacagccatttcatatctgtcccttcgaatgccttgcaactctgtaatgctgttgtg

SEQ ID NO: 2429 - DNA, 545 bp, Mus musculus
ttctcctagggtaatcccctccctgccaatcatgttcctgaggagcagcgcctcccgtctcctccacgggcaaattccttgcgtcctgacgagatccgtccactctgtagctatagtcggagcccctttctctcggggacagaagaagctaggagtggaatatggtccagctgccattcgagaagctggcttgctgaagaggctctccaggttgggatgccacctaaaagactttggagacttgagttttactaatgtcccacaagatgatccctacaataatctggttgtgtatcctcgttcagtgggccttgccaaccaggaactggctgaagtggttagtagagctgtgtcaggtggctacagctgtgtcaccatgggaggagaccacagcctggcaataggtaccattatcggtcacgcccggcaccgcccagatctctgtgtcatctgggttgatgctcatgcggacattaatacacctctcaccactgtatctggaaatatacatggacagccactttcctttctcatcaaagaactac

SEQ ID NO: 2430 - DNA, 475 bp, Mus musculus
atgttactagcaagtcttattgttgtacaaattacagaatacccagtttttaaaaaaacatacacatgacctttgatggtacatttctatgctggcaaatatatttctgatacaaaggcactttgaaaacccaatatggtttggtttgtaagtttgcaaggtacaaactatttctacaaacatatgattacactgaagaacgtcaacaactgtgacattacatagaaaacagacttctttttgtaaaaacaacactggttttatgggaataaaagcagtggtttccagcagctttagtgaagacattcagaaggttgaaggcctccagtctgaatttctcactggctgggtgggatgataaggatggggtgagtgtgatcagcaagaaccctcagcggggaaagataacccaataccctagaagggacccagaaccctcagcagtcagaatggcttgaagggaaagcacacaggc

SEQ ID NO: 2431 - DNA, 578 bp, Mus musculus
  misc_feature (1)..(600): n is g, c, a or t
tagatcacagccatggccacgaagatcattgccatagtcacgaagccaagcacggagctgcacacagccatgaccatgaccacgctcatggccatgggcacctgcattcccacgatggcccatccttcaaagcaacggcaggacccagcagacagattttacaaggtgtatttttacacattctagccgatacactgggaagtattggtgtaattgcctctgccatcatgatgcaaaattttgggttgatgatagcagatcctatctgttcgattcttatagccattcttatagttgtaagtgttattccacttttaagagagtctgttggaatattaatgcaaagaactcctccctcgttgggaaatacgcttccccagtgctatcagagggtgcaacagttacaaggagtttacaacttgcaagaacagcacttctggacactctgttctgatgtttacgtgggaaccttgaagctcgtggtagcccctgatgctgnacgccaggtggatcttaagccaaacgcataatatttttactcagngctggagtgagacagctttatgtacagattgact

SEQ ID NO: 2432 - DNA, 521 bp, Mus musculus
gcaagcaacactgggtttatttctatttaaacaataaatacagctgagttagctttccaacccgatctccttaagaaagggctttagagctgcagtctctcattaccttcagttgggatcttccgctcacacctgcagcactggctgctcaagcaccaggaactagttttgttgacaagatggtaccttccagctacatgaacaccaatgttcatgaggaagaatggaggcttttcatcgacaaagaagctaagttttgatggctttgccttcgagggcatcgaacatgtcttccaagcacttctggacacagtggagaaactctcgggcattgcgtcctgagtaggaggagacattgcagcctatccagtcatcgtgaacagcatacgcaatgccaaagccatcagggaccacaggggcaaagccaccgaggctcactgctgggctgctcagagtgctggtggacaggatgttgtggtttatccgctggtatgcagggtcctgatagagctcaggcaggg

SEQ ID NO: 2433 - DNA, 554 bp, Mus musculus
gcgcctgctgttgcgtgactggccccggtgcccctcgcttgtcctgggagcccctagtcggcccttaagtgctgtctcggggcccgccgagtatctgcagcacagcatcgtacccaccatgcactaccaggacagcctgcccaggctgcctatccctaaacttgaagacaccatgaagagatacctcagtgcacagaagcctctcttgaatgacagccagttcaggaagacagaagtgttgtgtaaggattttgagaacggcattgggaaggagctgcatgcgcacctgctcgctcaggataaacagaataagcacaccagctacatctcaggccagggctttgaccgacacttgtttgctctacggtatctggcagcagccagaggggtcaccctgcctgagctctatcaggaccctgcataccagcggataaaccacaacatcctgtccaccagcactctgagcagcccagcagtgagcctcggtggctttgcccctgtggtccctgatggctttggcattgcgtatgctgttcacgatgactggataggct

SEQ ID NO: 2434 - DNA, 744 bp, Mus musculus
ccttttcaaatgcttttaatgcttttcagacagtgagagcttgttgcaatggctggaggctgcactggtggctgagagcaccccttgcctgcccgcaactccttccctccaggaaatgcttgagaggggccacgcccgccttgaggccccatcttgtatggtagaatgttctatccaggatggccctgctcctccttcccccaaagtctccctcaagcccaggagaaggggttcttgcaggtccctagttgctgatgacgtgcccagaccaggtctcatgcttggtccctggtgccaggtgggtgatgaccacctctacagcctgcagcttctcgttcttgggtgggatagagcacatcttataggtgacttcgtcgccttccaccggaacatactccccttccacatcagagatgtgcaggaagatgtcaggaccaccatcagctggggtgatgaagccgtggcccttggaccggcagaagcatttacagactcctttgtagacggggccctgcgaagcccgcactgtcgctgagaaggtccttgtccggcgggtaggcagagggctagggaccacattgccccgcaggggggatggagagcgatcccgggtgcgaggggtatccaatagccctacagaagtctgatgcgtggggggctgcaccggcggcggaggaggctcagatgacatgcctgacctggcgacacgtcctactcctccagttgctggatagtcgaagctgg

SEQ ID NO: 2435 - DNA, 581 bp, Mus musculus
gcagctggaggagtaggacgtgtcgccaggtcagccatgtcatctgagcctcctccaccgccgctgcagccccccacgcatcagacttctgtagggctattggatacccctcgcacccgggatcgctctccatcccccctgcggggcaatgtggtccctagccctctgcctacccgccggacaaggaccttctcagcgacagtgcgggcttcgcagggccccgtctacaaaggagtctgtaaatgcttctgccggtccaagggccacggcttcatcaccccagctgatggtggtcctgacatcttcctgcacatctctgatgtggaaggggagtatgttccggtggaaggcgacgaagtcacctataagatgtgctctatcccacccaagaacgagaagctgcaggctgtagaggtggtcatcacccacctggcaccagggaccaagcatgagacctggtctgggcacgtcatcagcaactagggacctgcaagaaccccttctcctgggcttgagggagactttgggggaaggaggagcagggccatcctggatagaacattctaccatacaagatgggg

SEQ ID NO: 2436 - DNA, 499 bp, Mus musculus
ggagttaaggcaacatttattcagtttgtattactccatggaaggcatacagtggtgactactgacagataccatttctcttaaggcctccgatggttggtgtttttattctaacacgtcagacaggtatgaagtagacagaacccaatgcatcttgcctcatcaaggcttggtcacatacaatcactgtctcagcagggctgactcgaaggtctcctgtgttccgtggcctggcccagtaagtgtgggcagtgtgcttgtgatgccttcaggctgtgttctggatgatcaaggcgatgccttggccacctccaatgcaagctgatcccactgcgtactttccacctcgacgccttaactcatgaaccaggtgtgcggtgattctggagccagatcctcccagcgggtgacccagggcaatggcgcctccactcacattggttttgctggggtcaagatccagggccttctgaacagacaagaactgaggggcaaaagc

SEQ ID NO: 2437 - DNA, 594 bp, Mus musculus
aggggcgcggcctctcggggctccgcccacactcttaaggctgggctagggctggtggccgggtgttgctgagagagccccgcggaatagctgagcttcgccatggccctgctacgaggtgtgttcatcgtcgctgcgaagcgaacaccctttggagcttacgggggccttctcaaggacttctctgccaccgatttaactgaatttgctgccagggctgctctgtctgctggcaaagttccacctgaaaccatcgatagtgtcatcgtgggcaatgtcatgcagagctcttcagatgcggcatacctggcgaggcatgtgggtttgcgagtgggagtcccaacagagactggggcccttaccctcaacaggctctgtggctctggtttccagtccatcgtgagcggatgtcaggaaatctgttctaaagatgctgaggtcgtcttgtgtggaggaacagagagcatgagccagtccccctactgtgtcagaaatgtgcgcttcggaaccaaatttggattagatctcaagctggaagatactttgtgggcaggattaacggatcaacatgttaagctgcccatgggaatgact

SEQ ID NO: 2438 - DNA, 546 bp, Mus musculus
aagggctaagtaactggatttttattttaatacacagtatgagaaatgaacttgtaaatcaactgaattgtatggaaaatgaaacagtaaataaattagacccatgtttaacacagaaggtcagctaatgttcaaacttaaggctatcatggacaggtcaattccaccagtcttctttaaaggttggagtcttccaagtacaactttgctatgaactggcccagagttcatcagcaaatgggaatgcttaacaggggtggtgatcggggacacgtttccttggtgctgctttgataatgttgtccactcgcaggatcacctctgctgcttcagccgcactcagaagaacctgtcgcttcacttgaaaactctctgttatacccagtactgccatatcgccgatggtaccttccttcatatccagtccagcagttatatggccttcactgtgagcagctcggagctgtgccaccagatctgcactgtcatagcccgcattgtcggctatgatggtcggcaacattctcagggcttttgcaaacgact

SEQ ID NO: 2439 - DNA, 600 bp, Mus musculus
gcttcccggcgcggattgtgaggggttctctcctctacgcggaatccgtcggaaccatggcttccctttccctcgcacctgttaatatcttcaaggctggagctgatgaagagagggccgagacagctcgcctgtcgtcgtttatcggtgccatcgccattggagacttggtgaagagcactttgggaccgaagggcatggacaaaattctcctaagcagtggacgagacgccgctctgatggtgaccaacgacggtgctaccattctcaagaacattggtgtggacaaccccgcagcaaaggttctagttgatatgtcaagggttcaagatgatgaagttggtgatggcactacctctgttactgtcttagccgcagagctgctccgggaagcagaatctttaattgcaaaaaagatacatccacagaccatcatctcaggttggagagaagccacaaaggcagcaagagaggccctgctgagctccgctgtggatcatggttctgatgaagccagattctggcaggacttaatgaacattgcaggaacgacattgtcctcaaagctccttactcaccacaaggaccactttactaaac

SEQ ID NO: 2440 - DNA, 571 bp, Mus musculus
ggtttttaaagagggcaattttattgtctcagaggggcagagcggagggagaaggctacaaagctgctttcccaataccccaagaatacatattctctactcttcccacaggttctggggatgacctatggacactgtcccaggggtccttaggctaaggagggacatgaaagtcatacaagtttcttagacatgtcagtggctgtaaacatagggctgggggcctctctgctctggagggaatcttggtccattcttgatcaggggagaggtgcctaacccctttttgggcctaagagtagtcccagaaggggtcatggaagctgggcaaacaatcccaggacaatgctacacctcaccaggtcagacaagtgagccctgggcttcaccacagcacacagacacacacacagtgcacttgggaaccttaagttagaatgctaaaagatggggatgtagttgtcgatcttggcgcgatggcgctgggcaatgcactcagcaatccatacgatgttgcgacattcctgttccttaagcttcacaaaggcataaaagacaccaaaatggaact

SEQ ID NO: 2441 - DNA, 535 bp, Mus musculus
agtacagattatggcaacttcctggccaatgaagcgtcacctctgacggtgtcagtcatcgatgacaagctcaaggagaagatggtagtagagttccgccacatgagaaaccatgcttatgagccgctcgccagcttcctggacttcataacttatagctacatgattgacaacgtgatcctgctaatcacaggcacactgcaccagcgttcaatagctgaacttgtgcccaagtgccatccgctaggcagctttgagcagatggaggctgtgaacatcgcacagacacctgcagagctctacaatgccattctggtggacacacccctggcggcttttttccaggactgcatctcagagcaggaccttgatgagatgaacatcgagataatccgaaatacgctttacaaggcctacttggagtccttctacaagttctgtactctgttgggtgggaccacagctgatgccatgtgtcctatcctagagtttgaagcagaccgccgcgctttcatcatcaccatcaactctttcg

SEQ ID NO: 2442 - DNA, 520 bp, Mus musculus
agggcaaacaattttaatcaagttcatggtcagctgctaggatggtcctgcactagcctggaagggcaggaacagtcttcactggggtcacttgtaagggggcgaagggggaacccattcatgaatcttttttttagggggggaataaggaacgtattgctctggaggggcagacacattgaatttatggtttggccaaatgaatttacgagcagtcgggggattagtcgtcggagggtcgtcagtcatgcagtgaagccagcggtgccactcaggaggcaccatgcttccatccacatcccaaaatgggtttttgccgttcatctcgggggggtagatgacccatcgggggcggccaaaaaattgcttggtggcttcggagtatttatttccatatttggcttctcccaccagtgtaccaatccttatatcatttgccctgaagaaaacccgtaggaggccccgcaggccgccgtggccggtgacctgctgcacgccgcgcttcaggacggatagtcga

SEQ ID NO: 2443 - DNA, 556 bp, Mus musculus
  misc_feature (1)..(556): n is g, c, a or t
tcctgaagcgcggcgtgcagcaggtcaccggccacggcggcctgcggggcctcctacgggttttcttcagggcaaatgatataaggattggtacactggtgggagaagacaaatatggaaataaatactacgaagacaacaagcaattttttggccgccaccgatgggtcatctacaccaccgagatgaacggcaaaaacacattctgggatgtggatggaagcatggtgcctcctgagtggcaccgctggcttcactgcatgactgacgaccctccgacgactaatccaccgactgctcgtaaattcatctggacaaaccataaattcaatggggctggccattcaaaaccattccgttctttattccacactagaaagaagattcatgaatgggttccaccttcgacaccttacaagtgaccgcagtgaagactgttcctgcacttccaggctagtgcaggaccatcctagcagctgaccatgaacttgattaanattgtttgacctannnnaaannnnnnnnnnnnnnnnnnnnnnnnnnnnaaaaaaaaaaa

SEQ ID NO: 2444 - DNA, 282 bp, Mus musculus
cacacaatgaagctttattcgttctcaacgactagagaaaagcaagctcgctgacgcctcacttgagaatgctgtcatcttgagcttccgccagttctctctcaatccgtttcaactcatctagtctcttcttttcctccgctgctattctcctctcctcctctgcccggggttttaggtaactgtagcgcttggcgccgtatgccatgccgatgatcagagcggagtaccggccgaacttgatgagtggagagacctgaaccgggggcaccggatagtcga

SEQ ID NO: 2445 - DNA, 299 bp, Mus musculus
gtgcccccggttcaggtctctccactcatcaagttcggccggtactccgctctgatcatcggcatggcatacggcgccaagcgctacagttacctaaaaccccgggcagaggaggagaggagaatagcagcggaggaaaagaagagactagatgagttgaaacggattgagagagaactggcggaagctcaagatgacagcattctcaagtgaggcgtcagcgagcttgcttttctctagtcgttgagaacgaataaagcttcattgtgtgaaaaaaaaaaaaaaaaagggcggccgcg

SEQ ID NO: 2446 - DNA, 533 bp, Mus musculus
gaaatttttaaatgacttttattaaatccttacaaaacagaatacaaaatcctggcgttgacagttggtgggaaaggagtccggaggtcagttcacctggtacgatggagttaaaagtgcttgcatgtcccccactctacaacaggccttttagatttctgcatggtttgtggcgaagccagcccaggatcatgtctcattcacagttaaggggtctgacccatcctccaggtcgggcttggaaggactaaggaaatcacagccctgttttgggggtgagtgggggtcaatgctgctcactgcccagtcaggttgcttcaggaacctgcaggggggccgagtcctcaggtggccaacagctgagtcatactgatggaggaggtcccacccccaggggttctttggaaatgtgtccacagaggcaggtggggcaggactggagaaggcatgtcacctccactgtgacgatcctatgagactagggaggagggtggaggatgctgggcagtgggtgtcccaggcccccacccacc

SEQ ID NO: 2447 - DNA, 569 bp, Mus musculus
ccagagaacatcctatgtgagcaccccaaccaggtctcgccagtgaagatctgcgacttcgaccttggcagtggtatcaaactcaatggagactgctcccccatctccacaccagagttgctcaccccgtgtgggtcagctgagtacatggccccagaggtggtggaggccttcagtgaagaggccagcatctacgacaagcgctgcgacctgtggagcctgggcgtcatcctctacatcctgcttagtggctacccgcccttcgtgggccactgtggcagcgactgtggctgggaccgtggggaggcctgtcctgcctgccagaacatgctggttgagaaccttccagaagggcaagtatgagttccctgacaaggactggtcccacatctcctttgctgccaaagacctcatctccaagctgctggtccgagatgccaagcagaggctgagtgctgcccaagtcctgcagcatccctgggtgcagggggaacagctgtgccaaagacctcacgtcctttgcggctgaggccatcgccatgaaccggcagctggcccagtgtgaggag

SEQ ID NO: 2448 - DNA, 555 bp, Mus musculus
attgcatactctaaattttattttgctattattgacaaatgcagaataaataacaaaataagaacaggtttcaaataaaggcaaaaaataatgtccaacagcaataaactaggttaattataaagtaattaacttaattagaaagtgcattaaattaccacttaggggttccattaggcccagaggtgatctgagaagggccacgttaaatcgtaacctcatgccaggctacagacatttcaaggcttgactcagttttcgggattggagttccctttgtttttcctcccaggcaaagggaagctggatttgctctggggctgagaaagcttgctggccagtaaagtgaagggttcaatcagtgtcctccggtctgccactgtcacctcccacagcttgactttctcacttcttgcccactgttgtgccacgtcagcatccacctgtctctgctcagaaaggtccagtttgtttcctaacacaacgattgccacctcctttttgtctttgaacttatcaatctctttcttcagaagctccactctttggaaggac

SEQ ID NO: 2449 - DNA, 568 bp, Mus musculus
gggccggaggaagcaggtcggggaccggctccagagggacgccttcggaccgcggtgacctgcgtgctgctgtctcactgccctgcagtgtcagtgctgccctaggagaagatggggaagggttgcaaggttgtcatttgtgggttgctgtctgttgggaaaactgcaattttggagcaactcctttatgggaatcacactattgggatggaagactgtgaaacgctggaagacgtgtacatggcatctgtagagacagaccgtggggtgaaggagcagctgcacttgtatgacacccgaggcctgcagaaaggcgtggagctgccaaagcattacttctcatttgctgatggctttgttcttgtgtatagtgtgaataaccttgagtccttccaaagagtggagcttctgaagaaagagattgataagttcaaagacaaaaaggaggtggcaatcgttgtgttaggaaacaaactggacctttctgagcagagacaggtggatgctgacgtggcacaacagtgggcaagaagtgagaaagtcaagctgtgggaggtgacagtggcag

SEQ ID NO: 2450 - DNA, 563 bp, Mus musculus
gccatcaaagtgttttaatagttataaagtgtcttaaagttttctactgaagtaagaccacagtgcttattgccggtcaacacaaggacacccagagccagagatcctgctggctgcccctggggctggattgatgtgtccagaggaacatcaggaaatgatcctcagggaaggcctttcctcctccagggcccgaagctgttcttccacctcatttgtccagtaaatgtcatacaggacgagctgctgaagggtgcagctgggctgtttgaggctctccagcagttgcaggacacctgggccccccatgcagttgttactgaggtccagttccctcaggctgcggttggccagcaggacattggcaaggctgctgcaaccactatttgtcacatcacagtctcccaaccaaagctcacgcagcactgtatctggctggctcagggccttgcaaagctcctggactccctcgtctcccagtgggttgctgctcatttgcagctccaacagagaacggcttttggtcaacacggagcagaagtagggacaggaggcagctgtga

SEQ ID NO: 2451 - DNA, 531 bp, Mus musculus
ctctgtgaaggacttcaggacccccagtgccgtcttgagaagcttcagttggaatactgtaacctcacagctaccagctgcgagcccctggcttcagtgctcagggtgaaagctgactttaaggagctagtattgagcaacaacgacctccatgaacctggtgtccgtattctgtgccagggcctgaaggactctgcctgtcaactggagtcactcaagctggagaactgtggtatcacagcagccaactgcaaggatctgtgcgatgttgtggcctccaaagcttcgctacaggaactggacttgagcaacaacaagctaggtaatgcaagcattggaacactgggcccaagaacggtggtttccaagctgtaagctcaggactctgtggctctgggaatgtgatatcactgcagagggctgcaaggacctgtgccgtgtcctcagagccaagcagagcctgaaggaactcagccttgcttccaatgagctgaaggatgagggtgcccggctgctgtgtgagagcctatt

SEQ ID NO: 2452 - DNA, 446 bp, Mus musculus
ggcatgaaactgttgtctttattcaatgaggctgagaacagggaagttcaaaaggcacacagttggggggatcctctatcaggggtagtataagttaagaaagttgtccaaggtggaaaaatagcaggaaggtctcaacgcctcctgcccacgggggcgtcttcagaactgtcatctctatggtgagtggctcggagagaggacgatgaatgtcacagatgaatctcttcctgggggctgtttataaggctctcccgtacccagatgcgctcgtgaacaccgtgcgcatgcgcgcacgcacacacggtttctaggagtagaacctgctgttgcttactctcttctctctcagcctccggttgcacttctcctggtacagctgcagctgattctcgttaacattgaactccttcaccagggcatcacggttggctccgcgcaggttc

SEQ ID NO: 2453 - DNA, 556 bp, Mus musculus
gtggaggacaagaaagatgagcacaagccccagggcgagctgtatatgtgggactccatcgaccagaaatggacgcgccactactgtgccattgctgacgccaagctgtccttcggtgatgacattgaacaggctgtggaggaggagccggtccaggacactccccccacggagctgcattttggggagaaatggttccacaagaaggtggagagtaggaccagtgcggagaagctgctgcaagagtactgtgctgagaccggggccaaggacggcaccttcctggtgcgggagagcgagaccttccccaatgactacacactctccttctggcggtctggccgggtgcagcactgccggatccggtctactatggagaatggggtcatgaagtactacctgaccgacaacctcacgttcaacagcatctacgccctcatccagcactaccgtgaggcacacctgcgctgcgcggagttcgagctgcggctcacagacccggtgcccaaccccaacccacacgagtccaagccgtggtactatgacagtctgagca

SEQ ID NO: 2454 - DNA, 546 bp, Mus musculus
cctttagcaactttttattttccagtttcagtaggtagagagcaaacacttgccagtatttctcctcttctgtctgtctggattttgagttaagtattaactttttctctggcctctagcttgacagcaacactggagtatgtggaggagaaaaccaatgtggactctgtgtttgtgaacttccaaatcgatcggaaggacagaggtgtgtccctcttccctctggcacttcagtaccctgtccccacttctgttgcaaaggaagttaaggcacacaacattatattcagtaccattacaattggatgaataagaagcatggaagaaattacagaatccattcaagggatatgatggattgacaaagaatgtcaagcaaatgtatcaagctctcacagtagtagggctagaaggacaggaatatatttaaccaggtgtagtctgttattgctcatctctcaaagagtttatattctgctggatataagacaaaatgagctggatattatggtacaaacctgtgatcccagcatttgaaaagctaag

SEQ ID NO: 2455 - DNA, 569 bp, Mus musculus
  misc_feature (1)..(569): n is g, c, a or t
cagatgctcagtaaatgggaatgaaaaaatggtttaggaataaggagaaggccaagggagccctcccacatctgactcatgttcctctggttttcttagttcttatgtcatacagtgaatttatctgtgtaagagttatattcctccaacagtccctcccaccaagaaacagcaaacgctttgattgcactaccctttatttcctaggatggaagtatcttaaatcacatcctgggcctcagagtcccgtgtgttgaggtttccaacccctcacagagatggaacatgtttagggaggctcactggccagggtggccaaggtccctttcaaggggattccccatggataatgccttggcccaagggagggagggcaggatgatctggtctaaccacctcgaagcccatgtagctaaaggctcgcagcagggcacctgtagaagaacagaacatatgattagaatagccactgaagctcagcccatatactcctcatacatgttttctcaagagagtgactagcaagcagggtagcgcaggcgtagggtgtgctntggagtgatagacac

SEQ ID NO: 2456 - DNA, 542 bp, Mus musculus
gagacttaaataaaggtttaatttcttacagatgaggtgttagggagaacaactttagattgtcttggcctttccttcatggtgccaaagtagtttccccagattcagccgtcacacccacattcatagtaggaagatggggtcttgggctgggaatgtattccagaaacccttctattggctttgctcagttccactgggtcacatggcagctcctcacagcagagaaggctgggacagtgaccaaaggtcggttgcaattggcacctgagccttctgggcttctaaagtctaggtccattggccagctgagcagcgccaggaacagctgaaaccagttccacagccgcaggtcacagaccctggccttctcccaatgactctagtctctaaggaatgactgaggccaaagccagaggctagattccatgcagggcacatgtcaccctcaggagggtgaggacccctatcccctcccacacaccaactcaagcgttcctgccgcctctgtggtatgaccagcccaagacaccctcaacacc

SEQ ID NO: 2457 - DNA, 535 bp, Mus musculus
aagcctcacatggtccctggcgctttcctgtcgtcttgctcacggcgatggtgcccttgccctgaaaggaagggctggccagagtcacccaggaggcctatggggcatagcacagagtgactgctgctgccccatggccagccatttggtggcaaaaatttgccagactgtcttagacaagaaaggcccgacttcttggctggctccttctggagctgtgtgacattcatcttcactgacagcccagatgaacgcctccaggagagactaggcccgcacctcgtggtcaccaactgttctgcagagcacagtcatcctgctctggcctgcaagatggctcggagaagtcgatgcccttctgggcaagggccctcagggggtctgccacgtggatgatgacaactatgtgaaccccaaggctctgctgcagctgttgaaaacattcccgcaggaccgtgatgtctatgtgggcaagcccagcctgaaccggcccatccacgcctctgagctgcagtcaaaaaaccgcacgaagctg

SEQ ID NO: 2458 - DNA, 737 bp, Mus musculus
cacatttctacattttattcccacaaggcagccagggtgaagctcgagcccagggccacaggcctctggaccttcctccggcagggatgcacgccaggtcctcaggactgccccaccagcaggctggttttcaggcagaccttcatgagtgccggggtggaaggctccaggggtcacagggcaggggggctcggtgtaggggcacacacttgtagggctagctagagatagcacggcaggtccttctctatcacctggggctcctccatgggaccatagcgcttcaccacgcagccgttcttatcaatgagaaacttggtaaagttccatttgatggcatttcccagcatgcccctgcccttgggctggactttcatccatttccacagtgggtgggcatcgtccccatttacacagatcttgctgtacacgtcaaacttgacgttgtagccggctgcaaactccttgatttcttgattacttcctggctcctgcctcccaaactggttgcaggggaaggccaggattagtaaaccacactcagcatatcgggcatgcagatcgactagctgagtgtagtttacgtcagttttgcctcattgcgaggccacgttggtgacgatgcacacgaaacccctgtacttatccaggcagaccatgtgcccgtcgatgtccttggctgagaattcgtgcatggagcgcgcacagcgcatagcatcgcgggatgcacacatggt

SEQ ID NO: 2459 - DNA, 569 bp, Mus musculus
agcactgctgtgcggggctctggctgcgcctggtctggcaggcaccatgtgtgcatcccgcgatgattggcgctgtgcgcgctccatgcacgaattctcagccaaggacatcgacgggcacatggtctgcctggataagtacaggggtttcgtgtgcatcgtcaccaacgtggcctcgcaatgaggcaaaactgacgtaaactacactcagctagtcgatctgcatgcccgatatgctgagtgtggtttacgaatcctggccttcccctgcaaccagtttgggaggcaggagccaggaagtaatcaagaaatcaaggagtttgcagccggctacaacgtcaagtttgacgtgtacagcaagatctgtgtaaatggggacgatgcccacccactgtggaaatggatgaaagtccagcccaagggcaggggcatgctgggaaatgccatcaaatggaactttaccaagtttctcattgataagaacggctgcgtggtgaagcgctatggtcccatggaggagccccaggtgatagagaaggacctgccgtgctatctctagctagccctac

SEQ ID NO: 2460 - DNA, 534 bp, Mus musculus
agacctccgccatcatgggtcgcatgcacgctcccgggaagggcctgtcccagtcggcgctgccctaccgccgtagcgtccccacgtggctgaagttgacgtctgacgacgtgaaggaacagatttacaaattggccaagaaaggcctgactccctcccagataggtgtaatcctgagggactcacacggggtggcccaggtccgttttgtgactggaaataaaatcttgagaatcctcaagtccaaaggccttgcccctgacctccccgaggatctctaccatttgattaagaaagctgttgctgtccgaaagcaccttgagaggaacagaaaggataaggatgctaaattccgcctgattctgatagagagcagaattcaccgattggctcgatactataagactaagcgggtgctcccacctaattggaaatatgagtcatccacagcctctgctctagtggcataaatgctgttgtgtgcacaagcaataaaatcactttgagtaaaaaaaaaaaaaaaagggcggccgc

SEQ ID NO: 2461 - DNA, 590 bp, Mus musculus
cgaagtaagtttgccagttttctgtcttatactgaggttcgccgggtcatggtgccagcctgactgagaagaggacgctcccgggaaacgaatgaggaaccacctcctcctgctgttcaagtacaggggcctggtgcgcaaagggaagaaaagcaaaagacgaaaatggctaaatttaagatccgtccagccactgcctctgactgcagtgacatcctgcgactgatcaaggaactggctaaatatgaatacatggaagatcaagtcattttaactgagaaagatctccaagaggatggctttggagaacaccccttctaccactgcctggttgcagaagtgcctaaagagcactggacccctgaaggacatagcattgttgggttcgccatgtactattttacctatgacccatggattggcaagttgctgtatcttgaagacttcttcgtgatgagtgattacagaggctttggtataggatcagaaattttgaagaatctaagccaggttgccatgaagtgtcgctgcagcagtatgcacttcttggtagcagaatggaatgaaccatctatcaacttctacaaaag

SEQ ID NO: 2462 - DNA, 518 bp, Mus musculus
actcaaagtgattttattgcttgtgcacacaacagcatttatgccactagagcagaggctgtggatgactcatatttccaattaggtgggagcacccgcttagtcttatagtatcgagccaatcggtgaattctgctctctatcagaatcaggcggaatttagcatccttatcctttctgttcctctcaaggtgctttcggacagcaacagctttcttaatcaaatggtagagatcctcggggaggtcaggggcaaggcctttggacttgaggattctcaagattttatttccagtcacaaaacggacctgggccaccccgtgtgagtccctcaggattacacctatctgggagggagtcaggcctttcttggccaatttgtaaatctgttccttcacgtcgtcaggaccaacttcagccacgtggggacgctacggcggtagggcagcgccgactgggacaggcccttcccgggagcgtgcatgcgacccatgatggcggaggtctgggatagtcga

SEQ ID NO: 2463 - DNA, 534 bp, Mus musculus; identical to SEQ ID NO: 2460

SEQ ID NO: 2464 - DNA, 783 bp, Mus musculus
gtttttcacaaataggactttttatttgtcactattaaaaatctggattttacactgattcttggactggcggttcatatccgtcagctcgctcaaccttagcacccgtctcgtctccagctgctttgccagagctgccgccttccccatgcagctccatgagcttgcccaattcaaacttgggtttcttcagcatttttacttttctaacaaagacgtcatggagaggataaatggactggcaagccttttctatgtctttcccaatgctgtctggaatcagtttattaactacttccttcaagtcattagtctgcacctctcgggtcatgatttccatcatcttcttccggatctggcggacttgctggtgctgcgcataggatgtctttcttatctggttgttgcgtttcttagtgaagccaacacagaaaagtcggagcaaatacccatcggtcgtcttgacatcaacgtgagcttcgatcatggtctgccacttcttgaccatggagcacattttgtcccgggtaagatccataccatggaagttagtcagacagtttttgccctgaacgtcctcagtgattagcttgaattttctaaacgcaacttcatcattctgtagatcagcaaggctcacttcaaacacacgacccttgaggccatcagaggcaattttggttccttgagtcctcgtgactagtgtcttcccgatgttcctaatattgaacatggctggagctttcacatcgtaccagtctttcttagaaaatggatcgacca

SEQ ID NO: 2465 - DNA, 599 bp, Mus musculus
tctccggtcggcaccatggcggtcggcaagaacaagcgcctgacgaaaggtggcaagaagggagctaagaagaaagtggtcgatccattttctaagaaagactggtacgatgtgaaagctccagccatgttcaatattaggaacatcgggaagacactagtcacgaggactcaaggaaccaaaattgcctctgatggcctcaagggtcgtgtgtttgaagtgagccttgctgatctacagaatgatgaagttgcgtttagaaaattcaagctaatcactgaggacgttcagggcaaaaactgtctgactaacttccatggtatggatcttacccgggacaaaatgtgctccatggtcaagaagtggcagaccatgatcgaagctcacgttgatgtcaagacgaccgatgggtatttgctccgacttttctgtgttggcttcactaagaaacgcaacaaccagataagaaagacatcctatgcgcagcaccagcaagtccgccagatccggaagaagatgatggaaatcatgacccgagaggtgcagactaatgacttgaaggaagtagttaataaactgattccagacagcattgggaa

SEQ ID NO: 2466 - DNA, 718 bp, Mus musculus
atttttaagtttggtatttatttattatttatttagagagccaggatctctctacatagccctggctgtcctggaactcactatgtagaccaggctggcctcaaactcacagaaatctactggcctctgctttcaagtgctgggaataaaggcatgtgtcaccatgcctggctaagacttttcacaagtcaatactttacggaaaacaggcaaagaaggcgacgtggtaagggacaagaaaagaagaaacacgtgcacttctttttcctgttttgtttaccagacagggtttctctgtgtagccttggctgtcctagaccaggactctagaccaggctggcctcgaactcacagagatcctcctgcctctgcctcccaagtgccaggagtaaaggtgtgcaccaccaccacccggcagatagacttaaaaaaaaaaaaagtttaacatacaatcttttatctctagattaaaaaaaaaaaaaaagacttaaattaccaggacattatttacaggattaatcacctctctgtgagtgaggtgctggggtgggtggggcgtgtacgtgctaggcaagcaccgagcccaggggtctcacatttaagccatcacattggacatgaaggggacactaagggcccctctttgtgacaggcagggttggctgggacaactcattttccagagtgaaggcaaggaagggaccagtcttctgacagc

SEQ ID NO: 2467 - DNA, 608 bp, Mus musculus
ccatttcaacactatgagaatgttactgttggacctccgaaaaacatctcggtgaccccaggaaaaggttccctcgtcatacacttctcccctccctttgatgtgttccacggggcaacttttcagtatcttgtccactactgggaaaagtcagaaacccaacaggaacaggttgaaggccctttcaagagcaactccattgtgctgggcaatctgaagccatacagagtatattgtttacaaactgaggcacaactgattttgaaaaacaaaaaaatccgaccacatgggctcttgagcaatgtatcctgtcacgaaacaacagcaaatgcctccgccaggctgcagcaagtcatcctgattccgttgggcatcttcgcattgctgctcggcctgacgggcgcctgcttcaccctgttcctcaaataccaaagccgagtgaagtactggtttcaggctccgccaaacatcccggaacaaatcgaagagtatctaaaggacccagaccaattcatcttagaggtcttggacaaggacggttcaccgaaggaggactcctgggactccgtgtcaattatttcttctccagaaaaggagcgagatgatgt

SEQ ID NO: 2468 - DNA, 627 bp, Mus musculus
ccatatgaaagtaacaatttaatttgttcaggctacagcacttatctgccctgtacttaggcctgtacaagcaagggcccgcagctccctctgcaagaagatgttcagctacgaggaccaaataacctgacatgaggctctgtttagaggtgagctgggggttgggctgagtcctttcggccttgaccggcaatgggccggcctcgctcctcccagatagtgaggccatcacaggagcagatctgcttggggttctggaaaaggccggcagagcgtgcaatgatgccacaggccaacctcttcccagaattccctgtgatcttggataagggatggcctccccggcccaggtcatcttccccctcatcgataaccaggctgcggccaatcacatcccacaccttcagctgtttatcctctatccggaaggtagctcggccaccagcttcagcccggacattggccagatctccccggtgccgatcagtgtcctgaggacccccatgagatgctccatcagggttaaaatggtccccacagctattgcagtccctcgtaaggtccccatactgatgcacatggagtccatgcagcccaggctctaggccgtcgatggttccctcaatc

SEQ ID NO: 2469 - DNA, 550 bp, Mus musculus
ggaggcaggctgtactcaagggtatgggcagtagccaattacagaatctgggagcagcagtggccattctggagggctgtggctccatacagggggtggtccgcttcctacagctatcctctgaactctgcttgattgagggaaccatcgacggcctagagcctgggctgcatggactccatgtgcatcagtatggggaccttacgagggactgcaatagctgtggggaccattttaaccctgatggagcatctcatgggggtcctcaggacactgatcggcaccggggagatctggccaatgtccgggctgaagctggtggccgagctaccttccggatagaggataaacagctgaaggtgtgggatgtgattggccgcagcctggttatcgatgagggggaagatgacctgggccggggaggccatcccttatccaagatcacagggaattctgggaagaggttggcctgtggcatcattgcacgctctgccggccttttccagaaccccaagcagatctgctcctgtgatggcctcactatctggga

SEQ ID NO: 2470 - DNA, 733 bp, Mus musculus
aaattaaagttcaagttttatacaacttatgaaacatcattatacagcttataaaatccagatggcgagatgtcagtgactgagatctacagttttaagaatccttttgctgagttgcccagtagtgtacatatttctcacagcttttccaaagaacctaatccacactaggcatggtccagcacacctgttaattctagtacttgggaggtagactcaagaggctgagttcaaggccagcctctgttacataacaagtttgagaccagcctgagctatataagaccctatctcctacaactaaaaaacaaaacagacgataatgatcccaatccagggaacttgagacctttaatgacattttggggacatcagaaaagcagttacagaaaaaaaaaaaaaaaaaatcacaacctgtgtggagaaacattcttcttaatctaaccatgactgcttgcctgtcagtcagtctgtcctacacagttaatgctatagtatggatctgaactctccccaaggcccaggtgttaaaagcttgtttccttgactgcggcactactggaaactgtggaaactttaggccagcccagtgtgaggttttagggcattaggggtgtgcctcaaaaggatctcagagacccatgtctcagactctgtcttctgcacccacaataacgtcaacagtttgttttatcgtgtcctcatgctacagtgtgctacctcactacaggcc

SEQ ID NO: 2471 - DNA, 608 bp, Mus musculus
atgtttttgtttttaaattggattcttttccagggtcagcaacaacaaaaaactcctgaaaaataagcactactccagaaaagtagtattctttccccctgtcacggcaagcctagaaagcctttgaggataaaatctttataggctggtcataattaaaaattctcttaggggcagcatttctttgctggattccttttgggattggccttaggaagaagaataggtggcttttctgttgcttactgtatgtgagaaaagtggtcaattgtagaaaacagtgacctttcctaaaatggcaagatccatatttctatttagctcctaacagcacactgcttaagacagtttaagaagtggctttccaattatggtacatggaccttttaaaatcattatggtgattgaaacccctattctaggcaagcagtctgccactgagtaatgtacccagccccaagtgaatatttgaaattgaaaatttgagcaaggaaagtatatattcatgtgcttttataggcctgacttttgttgttcttttagacagtcttagtccaggctggccttaaactttgtttgcccaagataaacttgaactgatcttcatg

SEQ ID NO: 2472 - DNA, 656 bp, Mus musculus
aagggcagccagcttctgaaggtgaagtccagctcgtggcgtagagaacgcttctacaagctacaggaggactgcaagaccatctggcaggaatctcgcaaggtcatgaggtccccggagtcgcagctgttctccatcgaggacattcaggaggtgcggatgggacaccgcacagaaggcctggagaaatttgccagagacatacccgaggaccgatgcttctccatcgtcttcaaggaccagcgcaataccctagacctcatcgccccgtctccagctgacgtccagcattgggtgcagggcctgcgcaagatcatcgaccgctcgagctccatggaccagcggcagaagctgcagcactggattcactcctgcttgcgaaaggctgataaaaacaaggataacaagatgaacttcaaggaggtgaaggacttcctgaaggagctcaacgtacaggtggatgacagctacgccaggaagatcttcagggaatgtgaccactcccagacagactcgctggaggatgaggagattgagaccttctacaggatgctgacccagcgggcagagatcgaccgtgcctttgcagaggccgcaggttctgcggagactctgtcggtggagaagctagtgacgttcctgcagcatcagcagcg

SEQ ID NO: 2473 - DNA, 487 bp, Mus musculus
ggataaagacttatttattatttatcttatcatttcccagaacaaaggccattgagtaagccattccctttagacttggttgggcagctgtcacatggctgacctcttaattacttcccacagcctttgccatgactgtggccatgcccacgtgggttgttctcatgcagcttctcatgacaggcaaagatcaactttgccatcagcatcatacactcctcaaagctcagctgattgtcctggtttgtgtccaggtcctccatgatgtcatttatgagggcttcatttctcttctctttcttcataaaggttgccaactgtgcttccaccatttgtctgaattccttcttgctcagggtgtcagggtgtccttccttcctagagtattgatggaaggtgtcgatgatggtggttatgctgcgctccatctgagaaggtgctttgttggccatcttcttgctcttcaaggctaaagagggatagtcga

SEQ ID NO: 2474 - DNA, 510 bp, Mus musculus
tctttagccttgaagagcaagaagatggccaacaaagcaccttctcagatggagcgcagcataaccaccatcatcgacaccttccatcaatactctaggaaggaaggacaccctgacaccctgagcaagaaggaattcagacaaatggtggaagcacagttggcaacctttatgaagaaagagaagagaaatgaagccctcataaatgacatcatggaggacctggacacaaaccaggacaatcagctgagctttgaggagtgtatgatgctgatggcaaagttgatctttgcctgtcatgagaagctgcatgagaacaacccacgtgggcatggccacaggcatggcaaaggctgtgggaagtaattaagaggtcagccatgtgacagctgcccaaccaagtctaaagggaatggcttactcaatggactttgctctgggaaatgataacataaataataaataaggctttatgcaaaaaaaaaaaaaagggcgggcgcaccgagcaca

SEQ ID NO: 2475 - DNA, 622 bp, Mus musculus
aactgtgaaatgaatgtttatttgaattttttgattagttgtacaactaattcatgacaaattaccacatggattttgtatgttcctcaggactggggtttgtcgatgacttcaaatttgggatcatcaaatttgaaggtaggaaatgtatccatctctcctttaccatacatttgtttaagcttataaagctctctgtccagatcttgctgatactctgggccaatatcaacaggtcctccagatgcctgtcgctttgatttgtactctcctatcttgtccacgaagagtttctgtacaggatcaagttccttattaaaggccacagctgtaacaccaatgttcctcttcaaatgcacagagactgctgaccgaaggacagaggagagcctgaagatcctctgcagaaccatggctgagtctctgtacttgcactgagtcccgagctgccagagtcaccgccgccgccaccgttctacttccggccctggctccgcctacacacgcctacccgccatcgcaaggcactatgggccgcggcttcagtcgttcgacgctcaccggacaggaagcgcctcgaagggagtctgcgaccggacgcctctaggtgagggatagtcga

SEQ ID NO: 2476 - DNA, 360 bp, Mus musculus
tcacctagaggcgtccggtcgcagactcccttcgaggcgcttcctgtccggtgagcgtcgaacgactgaagccgcggcccatagtgccttgcgatggcgggtaggcgtgtgtaggcggagccagggccggaagtagaacggtggcggcggcggtgactctggcagctcgggactcagtgcaagtacagagactcagccatggttctgcagaggatcttcaggctctcctctgtccttcggtcagcagtctctgtgcatttgaagaggaacattggtgttacagctgtggcctttaataaggaacttgatcctgtacagaaactcttcgtggacaagataggagagtacaaatcaaagcga

SEQ ID NO: 2477 - DNA, 737 bp, Mus musculus
gttacaaagttggaaagtgttttattgcggacatttgcacatacagtgttagtgacgttggcctcccttcctggggtggagccaggccctatctcagacattcacgcaaagcctcaacactcccgagttactctcttttttagtacctggggattcgctttggctagattttctattttaacccatgcttcttctcgctctttcatttttagcttctctttgagtttctctgctttgagctgctgagtgcagtcatcgaagagtttttggttcatctccatgaagagtttcagggcgttgtatatcaagccgtgtattgtcttgttccagtgggtctttgagttgcggtataaggacggaaacatgatgggcagaatcttcgctgcgttgtcactgattaaactcatgatgtactcgttgttccagtaatagagcgcccgctcggccacctggaagtgagggctggaaacacatttggctaactgtcggaaaagaggctccatgatcttcacaaactctgatggttcaattacatctaaaatttcttctaattcatttaagaacattacttcttttggactgtgagtctttggccagtatttgagaagtgccattaccactggttcagtgagggtgctgtccttcactaaaaactgcacgacacagtacgccagctggggatggtagacactcagggacttcactttgtgcaagggcagcaacaccttcagcaggaa

SEQ ID NO: 2478 - DNA, 689 bp, Mus musculus
gcggaggcaggggcggcggcggcggcccgcaccagccatgccgaataaaaacaagaaggagaaagaaccaccaaaaccggtgaaaagtggaaaaggtccaaaagaaggacaagatacagcagaaacagagatagccagcaggaaaaatagcctcacggttgtccagtcttcgacatctactaaaataaaagtaccaatccctcaacccgtcgccgtccctgtgaagaaagacaaacggcagaattcttcacggtttaatgccagcaataatagagagctacaaaaactcccatctttaaaagatgttcctcctgcggatcaagagaagctttttatccagaagctacgccagtgttgtgtcctctttgactttgtctctgacccactgagtgacctgaagtggaaggaagtaaagcgcgctgcgctgagcgagatggtggagtatatcacccacaaccggaacgtgatcacggagcccatttaccccgaggccgtccacatgtttgcagttaacatgttccgaaccttgccaccttcctccaatcccacgggagcagaattcgacccagaagaggatgaaccaacgttagaagcagcctggcctcatctgcagcttgtttatgaatttttcttaagatttttagagtctccagatttccaacccaatatagcaaagaaatatattgatc

SEQ ID NO: 2479 - DNA, 439 bp, Mus musculus
gttttcaacacctagtattttattcagatagcagtcctgttacacatggtccaaggacattcaaataagaactcaaatcagaagttaaagattggtcttcaaacatcatagccaacaatgccacgtttgcctatgatctctccgatataaaaccacatccacacctcagtggccaccaaaccattcagcacagcttccttaactgtaaggtgtttgaagctaccagttttagcactttgaatgatttttttcacactctgaatagctgtagggatttcagcaggggttgggggaaccagctcaaccttggcgtagtgccaaaatgtggccaatcgaggcttcgagtaagtcacggcagcggctaccatcgacggtgccttctccgcgaagttacggatgaacttggccatggtctaaggtggaaggtacggatagtcga

SEQ ID NO: 2480 - DNA, 464 bp, Mus musculus
  misc_feature (1)..(464): n is g, c, a or t
taccttccaccttagaccatggccaagttcatccgtaacttcgcggagaaggcaccgtcgatggtagccgctgccgtgacttactcgaagcctcgattggccacattttggcactacgccaaggttgagctggttcccccaacccctgctgaaatccctacagctattcagagtgtgaaaaaaatcattcaaagtgctaaaactggtagcttcaaacaccttacagttaaggaagctgtgctgaatggtttggtggccactgaggtgtggatgtggttttatatcggagagatcataggcaaacgtggcattgttggctatgatgtttgaagaccaatctttaacttctgatttgagttcttatttgaatgtccttggaccatgtgtaacaggactgctatctgaataaaatactaggtgttgaaaacanaaaaaaaaaaaaaaaaaaaaaaagggcggccgcg

SEQ ID NO: 2481 - DNA, 306 bp, Mus musculus
aaaatgggccccttttttttttgttttttgtttttgggcccaaaaagggtaaaataaaacggggccaaaaaggggaagggggccccgggggggaaaaaaggggcccagggggctggaggggccaaacagggggggggcccaggggggggcgggggaaaacaaaggggggggcccccggggagggaaaagggcccccaaagcggggctggaagggggggccccaaaaaggaacccccccaaaaacccccgggggggccaaagccggccggggtggggccccagcccccggggggggggggaaaaagg

SEQ ID NO: 2482 - DNA, 616 bp, Mus musculus
gatctgtgtcttgcttcaacagtgtttgaacggaacagacccggggattcccactgtactcgcttccagccgcctttacaagtctctccagtcgcagcctccgggaccatctcctcgctgccttcagctcctaggaccagtctgcaccgtctcttcgcggttagctcctactccggatcagccatgacctctcagattcgtcagaattattccaccgaggtggaagctgccgtgaaccgcctggtcaacttgcacctgcgggcctcctacacctacctctctctgggcttcttttttgatcgggatgatgtggctctggagggcgtaggccacttcttccgcgaattggccgaggagaagcgcgagggcgcggagcgtctcctcgagtttcagaacgatcgcgggggccgtgcactcttccaggatgtgcagaagccatctcaagatgaatggggtaaaacccaggaggccatggaagctgccttggccatggagaagaacctgaatcaggccctcttggatctgcatgccctgggttctgcccgcgcggaccctcatctctgtgacttcctggaaagccactatctggataaggaggtgaaactcatcaagaaga

SEQ ID NO: 2483 - DNA, 730 bp, Mus musculus
ctcattgtaagttgtttattgtaagataatttacaaacatcctgctgtctttgtaactcagtggaccaagtttcttctgacaaagacagcaatcagttaaaatcagcctgcgcattcttcttctttacctcttgtctgaggatgcaacttgattttcattaatccagagcagcagccccagagatgatttcaatcaactcctttgtgatgacagcctggcgggtgcggttgaaagtcaaggtcaatttgtcaatcatatcagaagcgttcttgctggcgttgtccatggcggtcatcctggcactctgctcactggtggtggactccttcagggagtagtagatgaggttggccagattgtactcctggtaattctgcagcacatcagcatcaatgtcatcatagatgctcatggtctcagcagtcgcaatggtattcagagagaagatgggcttctcttctgtcttgtaggagataacagacttgaactgattaaaaatgatagagccttcatcaaattcatatccagaatttaacaactcaagggcaatgactgatgcatctccaaaagtaggaggcttccgtcccacatctttgaatgacaccaaaactgatcagaatgagtcctataaagtatgcccttgattttttcaccatctccaacaatcataactttcttgcgagctgctgtgagggcagccacttcattcttcatctgtttagccactga

SEQ ID NO: 2484 - DNA, 672 bp, Mus musculus
catgttctcgcgggcgagcgttgtcgggctgtcggcctgcgccgtgcagccgcaatggatccaagttcgaaacaaggcaactccgaaagatattaccaggagactgaagtccatcaaaaacatccagaaaattaccaagtctatgaagatggtggcagctgcaaagtatgcccgggctgagcgggagctgaagcctgcccgagtgtatgggacaggttctttggctctgtatgagaaggctgatattaaggcacctgaggacaagaagaagcacctcattattggtgtgtcctcagatagagggctttgtggtgctattcactcctcagtggctaaacagatgaagaatgaagtggctgccctcacagcagctgggaaagaagttatgattgttggagttggtgaaaaaatcaagggcatactttataggactcattctgatcagtttttggtgtcattcaaagatgtgggacggaagcctcctacttttggagatgcatcagtcattgcccttgagttgttaaattctggatatgaatttgatgaaggctctatcatttttaatcagttcaagtctgttatctcctacaagacagaagagaagcccatcttctctctgaataccattgcgactgctgagaccatgagcatctatgatgacattgatgctga

SEQ ID NO: 2485 - DNA, 457 bp, Mus musculus
ggttaaggattgctttattggcagcagttaatacacatcaataaatattgatccccaaagaagagctcagttactcatcagattcctggtccatcgagcgttgatgaaactgaaccacgtgaagactgggatgacgacattagttctgcttcttgggaaatgcagccatagctaacagatagatggcataggctgtgccaccaagcgtcagagccattgtggctctgtagaggagggcatcagatgccccgcctttcagatgaactggcatcccattatcctcctgaaacagcttttgtttctctggaaccttgttttcaaaatgccttcgtgaagtggtgctgatggtcctctgggcaatctgacgaagggccagcagattccgcaacatcttggctcggttgttacccaccaaccgcgactactgaacgccaaaaatcgaaagccggatagtcga

SEQ ID NO: 2486 - DNA, 542 bp, Mus musculus
  misc_feature (1)..(542): n is g, c, a or t
gctttcgatttttggcgttcagtagtcgcggttggtgggtaacaaccgagccaagatgttgcggaatctgctggcccttcgtcagattgcccagaggaccatcagcaccacttcacgaaggcattttgaaaacaaggttccagagaaacaaaagctgtttcaggaggataatgggatgccagttcatctgaaaggcggggcatctgatgccctcctctacagagccacaatggctctgacgcttggtggcacagcctatgccatctatctgttagctatggctgcatttcccaagaagcagaactaatgtcgtcatcccagtcttcacgtgtggtcagagtttcatcaaacgctctgatgggaccacagaaatctgagtgaagtacatggacctttttttttgnggatccaatatttaatnggatgtggtattaaacctgctggcaaataaaagcaaatccttaaacccaaaaaaaaaaaaaaaggggcgggnncgctcttagagggatcccaagcttttacgtnnacgcgtgcatggggga

SEQ ID NO: 2487 - DNA, 568 bp, Mus musculus
ccaaatttgaggtgtatttacatatcaaattgggctcagtggaccacagtagatgggacccaaacaggaggggcaatatcagcctataccctatctctctcttcccctttgaggaggagcccagcttcctacccagggcctgcccaaggagaggggagaggcacaaacatgcgcaggcactggcccgcagccccagcctgtgcagaagaagaagggagacagggctcaggtggccaagttgtcggccgggaggctggacatgcggagctgggagctgctcttgctcaggatggacagctgggtgcccccgttcactccactgctggccagggatggatgccggtgcttgaagtccatagtgaagtaacggttcaccttccagctcctccatttcctcttaatctctgcctgtacctccccattcaggaagcagtagagtacagccaccacaaagccctggaaggagcccagcccaagctcaaacacaagtctttccctcttgctgacgttctctggagagaaggcaaatactgtgtagtggattccaaagagtgggatgagcagcagg

SEQ ID NO: 2488 - DNA, 606 bp, Mus musculus
ccctctacacagtcggctacagcacctccctcgtcaccctcaccactgccatggtcatcttgtgccgcttccggaagctgcactgtacccgtaacttcatccacatgaacctgtttgtatccttcatgctgagagctatctctgtcttcatcaaagactggatcttgtatgccgagcaggacagcagtcattgcttcgtttccaccgtggaatgcaaagctgtcatggttttctttcactactgcgtggtgtccaactacttctggctgttcattgaaggcctatacctctttacactgctggtggagaccttcttccctgagaggagatatttctactggtatgccatcattggctgggggacacctactgtgtgtgtaactgtgtgggctgtgctgaggctctactttgatgatgcgggatgctgggatatgaatgacagcacagctctgtggtgggtgatcaaaggccctgtagttggctctataatggttaactttgtgcttttcatcggcatcatcatcatccttgtgcagaagctgcagtccccagacatgggaggcaatgagtcgagcatctacttctgcgtgcagaaatgctactgca

SEQ ID NO: 2489 - DNA, 406 bp, Mus musculus
ggggggaaaaaaggggtttttaaaaaaaaaaaaaaagggggggaaaaaaagggggggggggggggaaaaaaaaaaaaggggggggggggggaaaaaaaaaaagggggagaaaaaagggggggggggggggggaaaaaaagggaaaaaaaaaaaaaaaaaggaaaaagggggggggaaaaaaaagaaggggggggaaaaaaaaaaaaaaaagggggaaccagggggggggggggctaaaaaaaaaaagggggaaaaaaccgggggggggggggggggggggaaaaaaggggggggggccctcaaaaaaaaaaaaaaagggggggaaaaaggggggcccccccccaaaaaaaaaaaaaaaagggggggaactttttaagggggggggggggaaaaaaaaaaaaaaaaa

SEQ ID NO: 2490 - DNA, 473 bp, Mus musculus
ttggttccaagacccgcagacgagtgggcctgaaagcccctggaattatcccccgaatctctgtgcgggagccgatgcagaccggcatcaaggctgtggatagcctggtgcccattggccggggtcagcgtgagctgattattggtgacagacagactgggaaaacatcgattgccattgacacaatcatcaaccagaaacgtttcaacgatgggaccgacgagaagaagaagctgtactgcatctacgtcgcgattggtcagaagcggtccactgtggctcagctggtgaagagactgacggatgcggatgccatgaagtacaccattcgtggtgtcagccactggctctgacgctgccccgcttcagtacttggctccctactccggctgctctatgggagagtactttagagacaacggcaagcacgctttgatcatctatgacgatctatccaagcaggctgtcgctta

SEQ ID NO: 2491 - DNA, 258 bp, Mus musculus
aaaaattaaaataatttaatttaaaaaattcaaaaacaattaccaattaaagatttaccaaaagcaaattagataatatccacagattaggttggcatctgtttgcagagaaatttatgcattatttttattaaaataacgtttttatttctacaatgagttggagaaatagtacaagaaaataaatttcttaaaggagcatttttttctaattttctattaggggttagctttttgttacaaagttcggatagtcga

SEQ ID NO: 2492 - DNA, 300 bp, Mus musculus
aactttgtaacaaagagctaacccctaatagaaaattagaaaaaaatgctactttaagaaatttattttcttgtactatttctccaactcattgtagaaatagaaacgttattttaataaaaataatgcataaatttttctgcaaacagatgccaacctaatctgtggatattatctaatttgcttttggtaaatctttaattggtaattgtttttgaattttttaaattaaattattttaatttttaaaaaaaaaaaaaaaaaaaaaaaaaaaaaaaaaaaaaaaaaaggggcggccgc

SEQ ID NO: 2493 - DNA, 631 bp, Mus musculus
caggagaaatgtttttatttgaagagcagtgtggacatgagaagaaaggatgacagaaagcaagggaggggatcaaggggccagcacctttctcagcaacccctccagggggctacccagagatgggctggcaggcccaggcccaggcccaaacaaggcctggcaatcccttaagagagagtgcctgggaaggagggaggcaggaggcctggggttcccacggagagaaagcaaggagccacctggtctcagcgatccatgctgtcgtcggtagggctagagaaacaggtctgtaacagcttttcacagaactccagctcctcctggtactccccacgctgctgcagcagctggcagcggtggcggagcagttcctccaggcccagctcaggctcccggcattcacgaacaccctgagggaaatctgtcacaaggctgcacagggctccaagcacatgctcatggaaaggactgtgttctgtcctcacaagggccaccagctgctggaccatccccatggagcaaagggttcctttgtgctcagggtggcccaccagcaagttctgcagcaggaatgctgacttgaccttgagcttctgcacttgctgctgcatggcccgcatcagcactg

SEQ ID NO: 2494 - DNA, 571 bp, Mus musculus
ggacaccattgctgcctcagcggtgaccaacaatttcctttaaacacattcttccttcacagaaagtccatggcagacaaaggctcagggggcactcgcctccctcttgcgttgcctccggcctctcagggttgtttttcagggggcagtggttcctcggcggggggctcaggcaacccccggcctccacggaacctccaaggcctgctgcagatggctattactgcgggttctcaggagccagacccccctccagaacccatgagcgaggagagacgccaatggctgcaggaagccatgtcggccgccttccggggccagcgagaggaggtggagcagatgaagaactgcctccgggtcctgtcccaggccacacccgcaatggttggcgaagctgagctggccactgaccagcaggagcgtgaaggcgcactagagctgctggcagacctgtgcgagaacatggacaatgcagcagatttccgccagctgtcaggcatgcatctgctggtgggtcgatacctggaggcaggggctgcagggctgcgctggagggcagcacaactcatcg

SEQ ID NO: 2495 - DNA, 565 bp, Mus musculus
aggcatagaagtttaatccatttctcatacaaggaggtaatagcaagtagtagaagggtggtcatgtattgcggcttcaggggacctcatgcacagggcagcagatgaccagccctagaacctgcccacccacccccacaagctaccacggtggctccggtgatttaagtcctgaaaagacacttcccagcaaatgctcccatggtggggaaagcgaggggttctcctgcccacccccaaccagatagagcagtgcaaggtggtgaagcctctggaaggatagttttatgtggtttctatgacaacgcactctcctttgggcggcacttaatgtagattctgccctctgaggagcacagctcctgtggtgggtcctcaccatgctgctgtagcagagtggagtgtacactggaccctctgcagggccagcagcttagtcgtcagcctagcagaaatatccacactgaccaagttcaaggtttacttgctaaaaaggaaggcttagctagtttcagttcctcctgaagtgttatttcctgttgaaaaagcaaagaactaaaccaac

SEQ ID NO: 2496 - DNA, 516 bp, Mus musculus
tgctatccgaagtgccatgcttccaggaaggaccatgggaatggttttgaggacctggatgaggaagaaggcgtggcatcctcctggcttcttacagaagaactgttgcagagttcacagcacagatgggcttagttggtccccacagcttcagcccatcatcatccccagaggccgagcagggagggagtggagctgagcccctgaaatcctgcacgtagctgagtgagcttaagccttcagtttggggtgtgaatagggatctgtggtagccagtgttcctatgttctgctagtacctgggtcaccagccatagggtacagccagccccagtgtgtggacttgatggcctgctgggtagaacctttgcttcaggcttcatgctcacagctaactgtcctttgcccttgactgtactgagtatgtgggaggatgacccatataggccatgcctctagccatctgtggaaccctgtgggtgtcaagtagaacccagaacccctggagaggagcact

SEQ ID NO: 2497 - DNA, 115 bp, Mus musculus
tcacaaggttttcccctaaaccagctccttggaggctggcaggagcagagaggggtgtgtgagggaggagaagcctgtcttgttggtgggaccctaattacccctgagcctctcg

SEQ ID NO: 2498 - DNA, 485 bp, Mus musculus
gaaaaataaggatgtttattaaggacatttctagcccacagctagggctcatatatggctctatgagcaactgtctgacctcatccccattcaatgtgaatgacattagagaggccaggccacaggtagatcccactgtcttgactaaagaggccatagcgaaggggcctctcaggggtaggcattgacaggtaaactgctgggcacgaggaaggaaaccactgaatatggtcttcttaccccttcccaggaccctcttcctcacctcccaggttcataggtcaaaggtacctagtaccatggggggatgccaagggaagcccctttattaggtcccaaaactatgggaaagagatggatcccctcccttttcagccattccaatcctgggggccactgaggtagaggggtaaggggccatgttaatccccctgtgggttctgctctaagacttgcccctcagtgaagttagcaggctttttgct

SEQ ID NO: 2499 - DNA, 585 bp, Mus musculus
cggcaaacatgtggcctcttcacccacacgatcttctataatgagtatcctggaggttctcgtgaactagatcgaagcatccgaggtggagagctctttctgacagtgctgcttaatccgatcagtgtctttatgacccatctgtcaaactatggaaatgaccggctgggcctgtacacctttgagagcctggtgcgcttcctccagtgctggacacgactgcgcctacagacccttcctcctgtccctcttgcacaaaagtactttgaactttttcctcaggaacgaagccccctgtggcagaatccctgtgatgacaagaggcacaaagatatctggtccaaggagaaaacctgtgatcgactccccaagttcctcattgtgggaccacagaagacaggcaccacggctattcacttcttcctgagcctgcacccagctgtcacaagcagttttcccagccccagcacctttgaggagattcagttcttcaatggccctaattaccacaaggggatcgactggtacatggacttcttccctgttccttccaatgccagcactgacttcctgtttgaaaaaagt

SEQ ID NO: 2500 - DNA, 563 bp, Mus musculus
ggtttagagaaacgttgttgttgttgttgttgttgtttaatggtaaagctcagtagactccagcaccaggactggcatggagtcaaagcagcagggacggctgggtgaccccagggagcctcacatggcgaagaggatgaggaaggcgaccatcaaacagaagagtcccatggcctcagacagggcaaaccccagaatggcataggagaagagctgctgcttgagagatgggttcctggcatagccaataatcaagctaccaaacactgtgccaatgccagctcctgatccagccacaccaactgtggcggccccagcaccaatgaacttggctgctgtgtcgatgtcccgggaaatgacactggtctggaattcccgtcgggccacctggagaggggagctgctgcaggaaggctgcttagatggggcctctggtctgctcaggagggaggcagacacaggcctgattagacccctggtacaggagcgaatcagagctggagaaatgagcagtgccttggtggtctgcatttttcaatctcccagctttagcggatagtcga

SEQ ID NO: 2501 - DNA, 589 bp, Mus musculus
  misc_feature (1)..(589): n is g, c, a or t
ctaaagctgggagattgaaaaatgcagaccaccaaggcactgctcatttctccagctctgattcgctcctgtaccaggggtctaatcaggcctgtgtctgcctccctcctgagcagaccagaggccccatctaagcagccttcctgcagcagctcccctctccaggtggcccgacgggaattccagaccagtgtcatttcccgggacatcgacacagcagccaagttcattggtgctggggccgccacagttggtgtggctggatcaggagctggcattggcacagtgtttggtagcttgattattggctatgccaggaacccatctctcaagcagcagctcttctcctatgccattctggggtttgccctgtctgaggccatgggactcttctgtttgatggtcgccttcctcatcctcttcgccatgtgaggctccctggggtcacccagccgtccctgctgctttgactccatgccagtcctggtgctggagtctactgagctttaccattaaacaacaacaacaacaacaacaacgtttctctaaaccaannnnaanaannnaaaaaaannnnggggcggccgca

SEQ ID NO: 2502 - DNA, 156 bp, Mus musculus
ggggtaaatttaaaaagtttaataaatcaaaggaaaatgaaaggggacccgggggaagaaagcaaaaggtaaaaggaaagaattaagcgaggaataaaaggggggggcaggaagaagcaggacaaaaagggggaggacgagaaggggggaagaaaa

SEQ ID NO: 2503 - DNA, 586 bp, Mus musculus
ggaggcagctgcctggcatttgtgtggtctcgtcgtcagcgcagctgggcctacacacaagcaaccatgtctaagggacctgcagttggcattgatctcggcaccacctactcctgtgtgggtgtcttccagcatggtaaggtggaaattattgccaatgaccagggtaaccgcaccacgccaagctatgttgctttcacggacacagagagattaattggggatgcggccaagaatcaggttgcaatgaaccccaccaacacagtttttgatgccaaacgtctgatcgggcgtaggtttgatgatgctgttgttcagtctgatatgaagcactggcccttcatggtggtgaatgatgcaggcaggcccaaggtccaagtggaatacaaaggggagacaaaaagtttctacccagaggaagtgtcctccatggttctgacaaagatgaaggaaattgcagaagcgtacctcggaaagaccgttaccaacgctgtggtcacagtgcccgcttacttcaatggctctcagcgacaggcaacaaaagatgctggaactattgctggcctcaatgtacttcgaatcatca

SEQ ID NO: 2504 - DNA, 802 bp, Mus musculus
aaatcagtttgaagtttttgtatttcacaatttgtttttattagggtccacagtctactaaataaaagcacttaacaagacagtttgaaaaactatacaatttatatcttgggaatttcattcattcaaaaaacaaaacaacaacaacaacaaaaatcggtgcacattcacctaatttaaatgctgtttcatccctgtgtctaagatacccgaatgtggaagacttgattccaacactcaaagtcagcccaatagtatttttaaatatgtactacaacagaaagtttgtcctctcagcaaaatcagatatggtctagttcaccttgtaagaaacagtctggagcatacggacaggcaccactcacacatgcgcagaagcagagtctactttcagatccactttattttccttttccctcctcacatacagagcttctcagacatttcttccagctaaagtcactcgatgttggcaaggtaccattgtatccctaaaactttgttggcatcaaaatatgcagttaccagtgttaaatccataaaatatgtacacagcccagcacatgaagctttagacgtttggcaattacacacaaagaagacagggcccccactctgcatgtttggggtcgggagctcactggtccctgtctggcgaccgtacatgggttcaagggcagcagaggcagcaggcagttacttcagaggacactgaacactatgatctggaagcatgttatgatgtcacccaagtgtgtaccacaccacttcctcctccaaggtggcctcataatcctagaat

SEQ ID NO: 2505 - DNA, 627 bp, Mus musculus
ctgactatagggcatgtcagtttccagtctccttgcttgaagaatgtagtggtgtgactgatgctaattttggctattccaaaggacagccttgcatccttgtgaaaatgaacagaataatcgatttaatcccatatggatatccacaaatatcgtgtttgccaaaggaagaaaacgcaactatagcaacttatcctgaatttggagttttagacttaaagtattttccatattatgggaaaaaacggcatgttggatatcgacagcccctagttgccgtacaggtcaaatttgactctggtcttaacaagaaagaagtaacagttgagtgccatattgctggaaccaggaacctaaaaaacaagaatgagcgtgacaagttcttgggacgtgtttcgttcaaagtcacagcacgagcctaggaataggatgtctccacagaattcatgttgtgttgtcgccattttgtatcagctggacctgccattctaggattatgaggccaccttggaggaggaagtggtgtggtacacacttgggtgacatcataacatgcttccagatcatagtgttcagtgtcctctgaagtaactgcctgctgcctctgctgcccttgaacccatgtac

SEQ ID NO: 2506 - DNA, 763 bp, Mus musculus
cagctgtagacatttattgattcctctgttgcaccaacaacacactgtacgtcacaggagacagaagagacagaagaaaccacagacatctgcttgggggctttctttggtccttagtcatgtatcatacactttggcaaaaagactagtttacagactctcattgcagacctaacttctaattctctgtgtagtctggcaagggagactcgaaatggtactcgtgagtttgtctaaggccgagtcgcccagatgtaaacacttgactgtacaagtgtgccaaccgacgacagaactcctaagattccctagccttacagcatatacagttggaactggaggcaaacctcaccatcctagcaagtggagagacgggagggaaggtgagggagcatcagggagagagctacaccacagctgggggaagagacctcaccagaagcagggcccacgcagttattagaaatctgacagagaaaaccagcctagtgacttaaagaactgccaggttcagaaaccattcatttcctcactaagttaaccatgtgtgtcacaaactgtgaggcttaaaacccgagagaaggaaaacaagaagagagcatgtgccaagccagagaatacaagatcagtgctctaatcccaatatctctagactcaagccaaacagtgactcagctaacaacgcaacaggcagtagggggttgaagctaagtgcaggagaccaatcccgttcctctcttccacttcagtcctactgtccagc

SEQ ID NO: 2507 - DNA, 574 bp, Mus musculus
gatagtcggtctagtgctgtggcagcaagggctgggagaggtaaagggagggcaaatggggtccaggtgtggcatgtaggggcccattctccagggggcatgtccagaaaggaaaagagcagatggatttagttttttggttttccgaggttgacctgggtagaatctagattctagaggccagggtaccccagactcctttattccacccaccgactatgcctcctattaggtcccagccagctcatggctcagcagagccctctctccctttagtggctcgtgggtttcagcttcttcctgttccctggagcttcattctctctgcggagccgctaccgccctcagcacattttctttggtgccaccatcttcctcttctctgtgggcacagccctactgggcctgaaggaggccctgctgtttaaattggggtccaagtacagcacgtttgaacctgagggggtgctggccaacgtgctaggcttgctgctggtctgttttggggtggttgtgctctacatcttggctcaggctgactggaagcggccttcccaggctgaagagcaagccc

SEQ ID NO: 2508 - DNA, 775 bp, Mus musculus
gattattgaaagttaaaatttattaagccatcatgtgccaaatactcaggttcaaattaatttcaaaatatatacaggcatgtaatgaacttaaaaatgagaaaactggtctggaaattgcagagctacaagtgactgatggaactgaactgaaaaatctagatcatctgttacaaactgtttcccctcggtgcccaacattcaactgattcacaattatctagacctttaaagagaaacttttaataaaaagcacttggcaaccctaacaattttttccataaattgaaatgatattaactgaatccattgttttctacaaattaagttaattttaggcaaaagtgtcctcagtgacgaatgcggttcatcgtttatttaaatgttgaagctctcatactaagtttttacaagctggtgaacactgacaaactatttctcccacagaactataaccacacattcccagacagtataaatatatggttgaactaactttaatacacatcaccattttaccgattacataataaaacaaatgatcaagtatccaattattaagttacatagctcaaaaggcgtataaaacatttctgctcagttcactagcagatccatcccactttgtcttttttgcaagagattgggaagaggaaagccataattcaaacaagctggaaaacttctgataggtatggaaaacacaaaaatttcagaaattttgattaagaattggttagctacaacaatgtatctctatgtcttaaaaatattt

SEQ ID NO: 2509 - DNA, 593 bp, Mus musculus
gatagtcgaggaatttagaaggattaggtgccaaaatacccagcacaatacttgtatatttttagcatcatacagaaccaaaattgcaggaactgagaactctagaccatccatggtgtattccttcagtcatttcaaacactgcagggcttctctcgttatctgcctgctcactctgtttacatctcccacacttatgccagaatacgtcaggtttgcttagccatcctttattttttttattttttttttaactaagtcttgcgctgattatttaatatgtctgtctcattttgttttgttttgagaaacctctgtttgaaaatcaactttgttacagaagcacatatcttcaacaatgtctccagacaaaaagccttatagttaatttaatgtttgcactcagaagtgcaacctaacagggagggcctgaaaaagaaacgagaggaggctattaaatatttttagtaatatgttgcctttgtcatgtgcagagcatgtagagtatgctctttaatttagtaaatatttttaagacatagagatacattgttgtagctaaccaattcttaatcaaaatttctgaaattttt

SEQ ID NO: 2510 - DNA, 792 bp, Mus musculus
agttttccactgtatttaattggcatttgtcattgtgggcagagtggttttgttgtttgaagagcttgactcctgggatctatataccttgcttctggaatgctctgcagctggcctgtggtgacactgcaattggaaccttgtgggtgccaccttaaagcacgctgcactagaacttcaggacagtcctgaccacctcaacataggggccatctggaggaggcttcctctgacttccgggttgcaggaacttcttaattgtaggaatgttgctgattcttgtcttaaatgcctgcagcagagggaagtcggacagtacaggggcactgagttcttccaccatcaaaatggcttctaggagctggatgtctgcccaactgagctggttgccaacgagaaaagcctctccgtggtcttttaaaatcttttcaaacactgggaagtaacgggttttagctcttgacagtatcaaatcatagctctcctctttttccttgggggttttaaatggagccacggcaatcatcatcaccaggtcctgggtgccatctgcatacatgtcaatcctgactctctccttcaggtccttcccatacaagttgtacttggcagcgaggtagctgaggatggccctggtctgtgtcagcatcatcccatcgatttcaaccaagggtacttggccgaaaagcaggtgtccatccttttgcatcttctcatactgttcccttgtctcaagaaattcttcctcaaactccactccagccgcagccagcagccagcggatcgactcca

SEQ ID NO: 2511 - DNA, 658 bp, Mus musculus
tgaactttcgctcgcagaaccgcttctttccagtgcctggagacaacaatcccacaagaataaggaagctctgaagcaggagtcatggcagccaaacctaagctctactactttaatggcaggggacggatggattttatccgctggctgctggctgcggctggagtggagtttgaggaagaatttcttgagacaagggaacagtatgagaagatgcaaaaggatggacacctgcttttcggccaagtacccttggttgaaatcgatgggatgatgctgacacagaccagggccatcctcagctacctcgctgccaagtacaacttgtatgggaaggacctgaaggagagagtcaggattgacatgtatgcagatggcacccaggacctggtgatgatgattgccgtggctccatttaaaacccccaaggaaaaagaggagagctatgatttgatactgtcaagagctaaaacccgttacttcccagtgtttgaaaagattttaaaagaccacggagaggcttttctcgttggcaaccagctcagttgggcagacatccagctcctagaagccattttgatggtggaagaactcagtgcccctgtactgtccgacttccctctgctgcaggcatttaagacaagaatcagcaacattc

SEQ ID NO: 2512 - DNA, 680 bp, Mus musculus
ggcaatcttttaactgatatttattcagttaaaaaataaattaggaaatctcttaactgatgttccttgatttacattactaaagttacacagttcacacaatgcaattctgctatcagaattacatgagacttcttgcttaggttttaattagcagtaagaatcacaaattcaagttcttaattatcaataatttgtcagctaaggtacattcaggcaatagctgcaactacagaataggtgcactgcctaggtgctttggaaagacttaatctacagcactactaacagacaagacttatctgtgagtggagagtctaagtgcagtagagcagtataaacatactcatatatttaagcctcaagccctccaccctttacggaaatgcaactgttttctaccatgaagaactcaagctccgcgagggccaatgtttaatttgtagtccaaaccaagtggtggtacaattccctaccaaggccgaatccatagagtttgaagctaagtccagacattctaacacagtctaaaaataaaataactgcctgtatagagatgcttcttcagagcggtgaacaccatttaaggtactgaagagaactgtaatttactaaccaaacatttgaatacttatatacttacctgggatttcatttctgctgaaagaaatgggaagaac

SEQ ID NO: 2513 - DNA, 619 bp, Mus musculus
tctcgagctcattgctaaaagcagacaggaatatgaagacacagctgtgaaactgggaaccgatctagaatacctgaagaaaattcgtggcaaagtctggaaacagagaatatctagccctctgttcaacaccaattttacacaatggaattagagcgactttatctgcagatgtgggagcattatgcagctggcaacaaacctgaccacatgattaagcctgttgaagtcaccaagtcagcctgaataaagactgcgcacaggagaattgccctatacctgagcctcaaccttctgggggaagggaactagataacatgctttgtgtgtatctgtgtagttctgtgttgcagacggatgatatataatgataatagaatagcacattcagacttacttcctgcatgatagggagagacaagaaagaagaaatgctattccacaaggaatctcttagagttttgcagcaaacaggtggtgcacaggtctggaaggtctggtctcccttggtcttccatgggatgcttaatgtggaggggagatagagattaaccagccgttttgtgatgccgtggattgatcaagtcttctgatccttttttttttctttatattttgg

SEQ ID NO: 2514 - DNA, 742 bp, Mus musculus
ccttttttaaaaagttatttatttattcttttttttttttcttttttggtaaggttgaatgcacttttggtttttggtcacgttcagttggtcaaaggtaaaaactaagtttgaaaggtgaatgcaaaggaaaaaaaatgttttccaaagtccatgtgaaattatctcccatatttttggcttttgggggaaattgagtttgggttgttcgtctgtttccagggttggggaaaagtgggctgggtgggagggaaccagattggggtggagggagtttacacgaagcaggcagggccaatgtctagtccgaattcctggtctggggcaccaatgtccaagggagccacatcgatgatgggcaggcgggaggtcttggtggttttgtattcgatgactgtcttgccccaagttccggtgtgactcgtgcagccgtccacaagggtgctgtaggtgaagcgactgttgccttcgcctctgagctcgatctcgttggatccctggaggagcagggccttcttgaggttgccagtctgctggtccatgtaggctacgctgttcttgcagtgataggtgatgttctgggaggcctcggtggacattaggcgcaggaaggtcagctggatagcaacatcggcggggtcggagccctcgcttccgtactcgaacgggaatccatcggtcatgctctctccaaaccagacgtgcttcttttccttggggttcgggctgatgtaccagttct

SEQ ID NO: 2515 - DNA, 538 bp, Mus musculus
gtgatgctggtcccaaaggtgctgatggttctcctggtaaagatggtgcccgtggtctgactggtcccattggtcctcctggccctgctggtgcccccggtgacaagggtgaagctggtcccagtggtcctccctttcccaccggagcccgtggtgctcccggagaccgtggtgaggctggtccccctggtcctgctggctttgccggcccccctggtgctgatggccaacctggtgcgaaaggtgaacctggtgatactggtgttaaaggtgatgctggtcctcctggccctgctggtcctgctggaccccccggccccattggtaacgttggtgctcctggacccaaaggtcctcgtggtgctgctggtccccctggtgctactggcttccctggtgctgctggccgtgtcggtccccctggtccctctggaaatgctggaccccctggccctcccggtcccgttggcaaagaagggggcaaaggtccccgtggtgagactggccctgctggacgtcctggtgaagttggtccccc

SEQ ID NO: 2516 - DNA, 780 bp, Mus musculus
cgaaatttcttaaaacataagtctgagtatatttatttctctcaaatgcatacaagacaataattacacagcaacaaatcttttgttcaacaatgacttgattcataagcatttaaaatgtacataatttcacattgatacccttttatttttaaatacaataagtaaaaaagccccccaaataaccaatttttatatttcctatttatccttctatacatccaaactttaaaaagttacaaactgaacaactgtacagaacatataaatcatgtttaaaaacttgaggctgtaaaatcgctgcttccccagtacgattctgaaaaagtctcctgttgacaagcacagtcacagatgccagaagcaaactggagcaggggaaggaacagacagacacgagtttgctgtcttaatactttactaatcctgtcagttaaaaatggtgacgtgtgagaagtaacagccgggatttaatatgaggaatggagtttgcctcggcccgagacatacatttcaagtattttcctatttgatctgagctcgctgtagcaaaccaatgccaaaactaattattttcttccatacatccgctcaatgtctgcctggtagtgtgttttaagctctttacgtttcaacttgaaggcatctgtcaccagaccagtttcgggagtccatgggtcagggctcaaacgtatttttagtggaatttcaaacttttccagacttgctgaaatagcagcttcagaaagcactttaaggacctcattttcggatagtcga

SEQ ID NO: 2517 - DNA, 671 bp, Mus musculus
aaaatgaggtccttaaagtgctttctgaagctgctatttcagcaagtctggaaaagtttgaaattccactaaaaatacgtttgagccctgacccatggactcccgaaactggtctggtgacagatgccttcaagttgaaacgtaaagagcttaaaacacactaccaggcagacattgagcggatgtatggaagaaaataattagttttggcattggtttgctacagcgagctcagatcaaataggaaaatacttgaaatgtatgtctcgggccgaggcaaactccattcctcatattaaatcccggctgttacttctcactacgtcaccatttttaactgacaggattagtaaagtattaagacagcaaactcgtgtctgtctgttccttcccctgctccagtttgcttctggcatctgtgactgtgcttgtcaacaggagactttttcagaatcgtactggggaagcagcgattttacagcctcaagtttttaaacatgatttatatgttctgtacagttgttcagtttgtaactttttaaagtttggatgtatagaaggataaataggaaatataaaaattggttatttggggggcttttttacttattgtatttaaaaataaaagggtatcaatgtgaaattatgtacattttaaatgcttatgaatc

SEQ ID NO: 2518 - DNA, 620 bp, Mus musculus
gtttttcttttcttttatttttttttttaaaaaaagcccctaaactctacggcttcaaggaagcgccagaggaacataagttcatttctgtacacgtcgtaaagcaagaactcagttcccacgaccaaggcctggccctcctgtgggaccgcctctctgctgccccaggcctggcgttaaggcgattctgtcccgtgggccctgcacgcagggacacggatcacggccgccctggtactgtggggcccataccagtccctatgcggtgaccgtcccgcgctccgccccggctttggtgcagcattgtggaagtgcacgcgcctcccctttggtggctgaggcctccccatgtgacacccatgccccgggcctgcccccctcgagaaaatggcctttggattgaggggacaagctggactttatgagctaacaggggcgcacagggacggcacagcgcttctctcctgggtttaaatagttaatgctctcgaaggggatgatgagacacgggtgtagagatttccgccaaagtcctgtgtgaaggaagggaccccaagtcccgaaagatggtgcctacaggtgggccaaggagccccacaccaccaaggacactgccagtt

SEQ ID NO: 2519 - DNA, 575 bp, Mus musculus
agaatctgtatacaaatgagtacgtggctatcaagctggagcccatcaagtcccgggccccacagctgcacctggagtaccgcttttacaagcagctcagcacgacagagggcgtccctcaggtctactacttctgtccttgtgggaagtacaacgccatggtgctggagctgctggggcccagcctggaggaccttttcgacctgtgcgaccgcaccttcacgctgaagacggtgctgatgatcgccatccagctgatcacgcgcatggagtacgtgcacaccaagagcctcatctaccgtgacgtgaagcccgagaacttcctggttgggcggccgggcagcaagcggcagcactccatccacatcatcgactttgggctggccaaggagtacatcgaccctgagactaagaagcacatcccatatcgcgagcacaagagcctgacaggcactgcgcgctacatgagcatcaacacgcacttgggcaaagagcagagccgccgggatgacctggaggcgctgggacacatgttcatgtacttcctgcgcggcagtctgccctggcaggggctc

SEQ ID NO: 2520 - DNA, 523 bp, Mus musculus
aaagttttcatctttaatgaaatgactgtggaaataacatatatttccatgacaccagtactacagtcttcggagtcacagcaagatacacagaattacatccgtaattactatgaatgccaacatttcaggcagtaatttctgttacatggcaaacaagatcaagaacgcaaccatcaaacaaaagagacccatagcttcagacaaggcaaatcccaggatagcatatgagaacagctgctgcttcagtgaagggtttctggcataaccaatgataagactgccaaagactgttccaataccagcaccagaaccagcaactcctactgttgcagcacctgcaccaatgaatttggcagcagtatcaatgtctctgctgattacactggtctgaaactcccttcggatcagctgacacacaccattctgggccccattaaaaactgtagagccctctccagtcctagtctctggccgagataacactgatgcagaaattggtctatatgcaactctggatccg

SEQ ID NO: 2521 - DNA, 699 bp, Mus musculus
  misc_feature (1)..(700): n is g, c, a or t
tgccgccgccactgccgccgcctcgggagagaggaagcgggagaggagcccacgtcgcctgtcacctagatccacgccgcgccgccaggaagaaagatgttcgcctgcgccaagctcgcccgcacccccgctctgatccgagccggatccagagttgcatatagaccaatttctgcatcagtgttatctcggccagagactaggactggagagggctctacagtttttaatggggcccagaatggtgtgtgtcagctgatccgaagggagtttcagaccagtgtaatcagcagagacattgatactgctgccaaattcattggtgcaggtgctgcaacagtaggagttgctggttctggtgctggtattggaacagtctttggcagtcttatcattggttatgccagaaacccttcactgaagcagcagctgttctcatatgctatcctgggatttgccttgtctgaagctatgggtctcttttgtttgatggttgcgttcttgatcttgtttgccatgtaacagaaattactgcctgaaatgttggcattcatagtaattacggatgtaattctgtgtatcttgctgtgactccgaagactgtagtactggntgtcatggaantatatgttatttccacagtcatttcattaaagatgaanactnntaaaaaaaaaaaaaaaaaagggcggccgctgc

SEQ ID NO: 2522 - DNA, 545 bp, Mus musculus
ctttcctttaatgataactcccaaaaatttgggagttaggagggaggagctctagaaataggcacatttggaggggaagaaaggggctggaagaaaggaccagcacccaggctgaggtaaatatggccaactctaagctgcttggagataactctttccctagcccctactggcatcctcctttgtgggaggaacaagaagggaatgaggttgatgacaagtggacaggtcgggctgaggaacacagctggtggctttggacacggttgtggcagctcaaggactttcccatggagtgggctcaggcctgacagatttgagatgcagacagcctgagacaaccccctgcactctgctgagctgcccagaaccaggtgccctgacttgtgttgtctactttctctgctccagtgagggaacagagggcaggccagggggcagaggccatcagctcttccatccagtccaaggcctaagcccacatgggtctccagagctcagagggcaaagtctccagttttaaaactgggaacagcataagagtg

SEQ ID NO: 2523 - DNA, 672 bp, Mus musculus
cgcattgtgcagtactacggctgcctgcgggaccgtgctgagaagatcctcaccatctttatggagtatatgccagggggctctgtaaaagaccagttgaaggcctacggagctctgacagagagtgtgacccgcaagtacacccggcagattctggagggcatgtcatacctgcacagcaacatgattgtgcatcgggacatcaagggagccaatatcctccgagactcagctgggaatgtgaagcttggggattttggggccagcaaacgcctacagaccatctgcatgtcagggacaggcattcgctctgtcactggcacaccctactggatgagtcctgaagtcatcagtggcgagggctatggaagaaaggcagacgtgtggagcctgggctgtactgtggtggaaatgctgacagagaaaccaccttgggcagagtatgaagctatggctgccattttcaagattgccacccagcctaccaatcctcagctgccctctcacatctcagaacacggcagggacttcctgaggcgcatatttgtggaagctcgtcagagaccctcagctgaggagctgctcacacaccactttgcacagctagtgtactgagctctcaaggctatgcagctgccagctgccacctgctgagcaggcaaggggctgctg

SEQ ID NO: 2524 - DNA, 546 bp, Mus musculus
gaagcttttttttgagagagagagacacacacacagacagtcagtccactatgctgctctgtctggaactttctctgtataccagatgataagagatctgccggcttctgccacttgagtgctgggattaaagttgtataaatatacgtgtctttcccctgtttcttatcacatagcttaaaatgagctttaggatgcctgagaattacagcctgggatgttacaaggcctctagagctcaagagctcctttcgcctaaggctgcagggcaaattctaacaaaatccaggctagttctagcccactatgtagccaatcaggaccctcaacttttaatctctatttcccctaagaactaatactacaggcatgtgccatctcatctggtttacatttttggaaataaaaggctgactacttaaaggcagatttgaagtaaaaaatttgaagaaagaaaggtaggagattccacatttgataggtggagaacagaaaaagataataagggacattccattgctagttgaggaatctccttttctgcta

SEQ ID NO: 2525 - DNA, 630 bp, Mus musculus
gatggcgtattttcttgcactgagtgctgcggcgtcgctggccgctgaggagggcagagatttctgtgtgaaatagtgggagggctccaaggaagcctcttgaagagccgcagtcagaacaataaattgagaagtcgatgtgggcactgctagtctcgtaccggcggcggcttcaagtctgagatcatcgtggaaccgtcagctttgaaatttataaaacatggagaaaactaaagagaaagctgagaggattcttctagagccctataggtacttacttcagttaccaggtaaacaggtgagaagcaaactttcacaggcatttaatcactggctgaaagttccagaagacaagctacagattatcattgaagtgactgaaatgttgcataatgccagtttacccattgatgatattgaagacagttcaaagctccgacgtggtttcccagtggctcgcagcatctatggtgtcccatctgtcattaattctgccaattacgtctacttccttggactggaaaaagtcttaacccttgatcacccggatgcggtgaagcttttcacacgccagcttctggaacttcatcagggacaaggcctcgatatttactggagggacacctacac

SEQ ID NO: 2526 - DNA, 491 bp, Mus musculus
gcaactttgagaaagggtttatttggcttacaattgctggttaaagtccttcatttcaaggaagtcagggcatgaacttgaagaaactagttacattcacagtgagaagtagacaatgaataactgcatgcatggggaaggctcagcttgctcttatacagtccagactgatttgaccagagaatgatggtgcccacagtgggctgtcttccttaacaattaaattaatcaagccaatccctcagagacatgcccatggaccaagcaaacagaagcaatccttcattgagactctcttcttaggtgatgctagatttttgtcaagttgacaaagctagccagcacatacgccctcaaataaacatggacatgtgcatatacctctacccaccaggaacctaaacaaggcactggctcgatacttaccatatccaaactttccttcaaattatgaaggacctgccctacttcacacagagaatgaacaaaac

SEQ ID NO: 2527 - DNA, 595 bp, Mus musculus
aagcccatccagggacagcagaagaagccgtttggggaacactggaggaagcacaccctctcatatgtggacatcaagactggcaaggttactttggagtacagacctgttatcgacaagaccttgaatgaggctgactgtgccaccgtacctcctgctatccgctcctactgatgaaacctgacagctacaggaccagcttatgtgattatatagcatagcttacctgcgtttcccctcatacttgtcttggtaaaattctgctctcatgaacaaggagtcacttcatagattgtgatcaacagcttggtagtacttgctgtaagggattgagttgcgccagactttgtctctttattcttgtgcagtgataaaactggcataattcttaagtgaagtacaaatgagcaatcttttatttccaaataaaaccatgtagtagtggattttagttctatctattggtctgaaacagcaaatataattttcttccgctgtctagctgcagcacaagtattgttttgttcattctctgtgtgaagtagggcaggtccttcataatttgaaggaaagtttggatatggtaagtatcgag

SEQ ID NO: 2528 - DNA, 708 bp, Mus musculus
caattagacaacttttactaaatgagaaaactacatttaaaatgtgctttaaacaaaatggaattagaaaaaaaaagacatatgcattttaaagaacttttgcactgtgctgaaaatcaaatgttacttgcagtaatataatgtgtcaatccataaaatgttaacagagttctcaatttaacactttcaaggacgctataaggtttcacacatctatggtaacacataagaagggcattatataaacattatgtccatcctatgaagcgtacgaatttgacaatgttcaataaaagactttagaatcacatccaataagtgtcacatccaaagaatcataagtctgtgtatgctcttagttcctcctccttctaaaatctttgttgactttgctactccttgacatttgttaatgctaacccttaaaaaaaaaaaaaaagagaacagggaaagaaataatgcaataaactcttgatcacatacagaaattattgctactatacttcactacaaagcatgtctatacacatcatgacctttgattatgaaaacgcagagtaaaaatctttagtgacatagccttacagtcaaaacaacattcacatggcaattattagtgaacacccaatattcagagctgacaaatgtcccactgaccagcgttcatttaaatacatccttcacatagagagagggaaagaagagagc

SEQ ID NO: 2529 - DNA, 756 bp, Mus musculus
  misc_feature (1)..(756): n is g, c, a or t
gatgagtgtggatgagactttgatgtgttcattccagatattgaaaccatctgaaaagaaagctaagtaccagtatggtgggctgaattctggacgtcctgtcactccgcctcgaacagctaatccaccgaagaaaaggtgaagacaggaattctagaaagagaaaccatcagatttgttaaggacatacttcataatatataagtgtgcactgtaaaaccatccagccattcgacaccctttacgatgacacacctttaacttaaggagacggtgaaggatcttaaatttttttctaatagaaagatgtgctacactgtattgtaataagtatactctgttataatattcaacaaaattaaatccaaattcaaaagtatccattaaagttctatcttctcatatcacagtttttaaagttgaaaagcatcccagttaaactagccctgttagtgacccagatgaaagcatgaagatccatctgtgtaatgtggttttagtggtgcttggttgtttcattattttgagcttgttttgttttgtttgtttttgctagaataatggcatctacttttcctatttttccctaaacatttttaaaagtgaaaatgggaagagctttaaagacattcaccaactattcttttcctttacttatctacttaagtaactgttggatcttactaagaaaacttacccctcattacagtaaaaaggaactttagaggtcgataggttntaaaaatatacaaacta

SEQ ID NO: 2530 - DNA, 764 bp, Mus musculus
cttcccagcagcaaaacttttgatgatggcattgctgctgtgagctctccaaggcacttggagagggggatgaaatctggactgcatgagcggggctcagagcttttgaaagggagggcacagaacactaggcagagccaaattgtcttgttcagatgagaccaggaaaaactatttaggacgaattccactcccatctcaatagctcaacattccacactttcctatgcaggaaaatctccatagtttattcggaggctcaaagaaaggattgactttcaataacagtttctcccccagtgctgattctcaatccagattcgatctccagttttaaccgctctaaatctgaaaagttttatcatcatgtgtgtggggaaacctctgactccagagatcacactcatgtgtaccatccctaaggaagctgctagttgtccttcacgctctcttcctgggcagagtgaccatgaagtcctcatacccagtcacctgctaggatcatttcaaccaaagcaaaacccatccatgctattcctggctggtttttcttatggtgtagattcatctatcctaaggagaaggtagctccctctggaccagttggctaaaccacaaactaccatttattaaattccaagattcattcttaccagtttactaagtaaactgacacctagaaacaggagcagctaaggaccacagtggctgactctgccagttagccacagatcacagcaggctggcaggctgggatagctgag

SEQ ID NO: 2531 - DNA, 730 bp, Mus musculus
tcggagcctggtgataagcgacgctcccaccttcgcctctaactcgctgccgccaccctgcccagtgtcctccggagtcccggacccgagcacgatgtggaaacgatggctggcgctctcgctggtgaccatcgccctggtccacggcgaggaggaacctagaagcaaatccaagatctgcgccaatgtgtttcgtggagctggcagggaatgtgccgtcacagagaagggggagcccacgcgcctctgcattgagcaatgcaaacctcacaagaggcctgtgtgtggcagtaatggcaagacctacctcaaccactgtgaacttcatagagatgcctgcctcactggatccaagatccaggttgattatgatgggcactgcaaagaaaagaagtctgcgagtccatctgccagcccagttgtctgctatcaagctaaccgcgatgagctccgacggcgcctcatccagtggctggaagctgagatcattccagatggctggttctctaaaggcagtaactacagtgagatcctagacaagtactttaagagctttgataatggcgactctcacctggactccagtgaattcctgaaattcgtggagcagaatgaaacagccatcaacatcaccacttatgcagatcaggagaacaacaaactgctcagaagcctctgtgttgacgccctcattgaactgtctgatgagaacgctgactggaaactcagc

SEQ ID NO: 2532 - DNA, 644 bp, Mus musculus
gctgcgaaaccacctctttattttgcgtttctgctgtgtaccagtttgcacgagctgggagtgagagggttttgcgatggaaggcatattgtctgggagcagactctcccgcctcctagtagacccccatctggcgggctacactggagaagcagatttcatgacaagcgctacggaatgatcagtgtacagagttgctgggtggctgccggcttcttgcctccccatgggggccagagttaaacccatcactcttgcacaaaggtcctggagttgacctggggagctgcaaaatcttccctggggacaagaacagtcctgttcacccagcagatgtgctaatgcacaggcacaggattgtgtgcccggctgctgtggctccccctcaggctccatagctcctcaggtgtgtcttcctcctgcctctatgtcctccccttaaaggtgttcatacaggtgtaagtccccgagaacctgtgaatctcctccagtgcagcttgtgggagtatgcttttcaagataatgaggatattcatggtccacgggagcaagagaagggcctggttttgttgcacagcatctaccgtcctccgggctactgtctctggcttcagcggcgggaacaggctgggaaacctgactct

SEQ ID NO: 2533 - DNA, 655 bp, Mus musculus
ttcccagccgaaacggctgttggggcaagaaacttcttgttaaaacttcccaccccttggactctccacagcccctctcaccgtcccaatcttctgagacgctttttacctctccgccagagcagagtttatcttttttttctttttcttttctttttctttttcctcccatttttcctcgccctgtcctttacatctgaaaggagatcagttcaagagtgaccaggtgggacgcctccttttccttatttagtttattattgtttgggggagttttctttctatctttttttaattcctgtccggggagttttgtccaccgcctcctaccacctccccctgtaccccgctcctccgcgcggaggatggtgtggaaatggctgggcgcgctggtagtgttccctctgcaaatgatctatttggtaaccaaagcagccgtgggaatggtgttgccccccaagcttcgggacttgtcgcgggagtcagtcctcatcaccggcggtgggagaggcgtcggacgccacctcgctcgggagttcgcagagcgtggcgccagaaagattgttctctgggggcggactgaaaaatgcctcaaggagacgacagaggagattcggcagatgggcacagagtgccactacttcatctgtgacgt

SEQ ID NO: 2534 - DNA, 785 bp, Mus musculus
acacatctattttttatttcaattaaagtaatattatctgtataagattttggtccacttgttctcctggtactattcaagtttgaatatttcaatttagtttcttatatctaacataagaactaagtatttcacatgagcaaattaatatgatttaagtagatgtgctccttactatttctcatgtacaacagcccatctttccttctgcttcccatctcagtagctgtgcacctcttctctcacacccagcaacataagtgaaattagaacatcagtcactatactgaataatctccaattaatgtcaaatctccacatatttgatcacttccacaataacttcaaccactctggtcatttttatacttcccagcatcatttgtaaaaattaaagtgtgaaagacattctaaaacctccggagtcaacatcagcatggctacttatagtcatgccttgatgaaaggcccctggacagcgattgcttcgatttcaactcgacttcctctgggtaaagcagcgacttggtaagcagccctggcaggaaggctaccctggaaatatgttttatagatctcattgacagtgccaaagtcattcatgtcagccagtaaaacagttgttttcaccacattattgaagtcacagcctgcagctttcagaatctcacccaagtttttaagagcctgtttagcttcttctactactcctcctggcacaagctgtccactggaaggatccaggcctacctgtccagaaatgtaaatggtcctgggatagtcga

SEQ ID NO: 2535 - DNA, 583 bp, Mus musculus
aggaccatttacatttctggacaggtaggcctggatccttccagtggacagcttgtgccaggaggagtagtagaagaagctaaacaggctcttaaaaacttgggtgagattctgaaagctgcaggctgtgacttcaataatgtggtgaaaacaactgttttactggctgacatgaatgactttggcactgtcaatgagatctataaaacatatttccagggtagccttcctgccagggctgcttaccaagtcgctgctttacccagaggaagtcgagttgaaatcgaagcaatcgctgtccaggggcctttcatcaaggcatgactataagtagccatgctgatgttgactccggaggttttagaatgtctttcacactttaatttttacaaatgatgctgggaagtataaaaatgaccagagtggttgaagttattgtggaagtgatcaaatatgtggagatttgacattaattggagattattcagtatagtgactgatgttctaatttcacttatgttgctgggtgtgagagaagaggtgcacagctactgagatgggaagcagaaggaaagatgggctg

SEQ ID NO: 2536 - DNA, 821 bp, Mus musculus
caagaggctttcagaattttatttaaaaaatccagagtggatgaaaaaggaacaatcatcaagaatacagatgccagacattggccaaccaagagggtggctagagaagtatgcctcaggcccatgagaggcttatatcattctcatatcatactttaagctatggctaacacaactgctatccactgacctagcttctgcacctacagaccatggtacaggtagctcagtcttaaaggcatcagttgtaggagcaaatatacagaggtcattctttatagtagtgctcttggccaacaagcatctgcatatgatctcaactcaagatcaatgacagactacctccactgcatgtgaaatgggcttcccaccttgaaatcacagccatttcagcacaaaccaaatctaccttaatgattggttcacagccccatcccacccctttacatgcagctgaaaataacaggctagtgacagaacagtatgaacctgctattgctgactttattacccattaaatgagttagcaattgtcactaagtttatatattaaggaaattatatatagaatactgcaaaaatacagtaaaaagactgaagtctgccccttttctgctcaggaagtccctttagtcccaagcttcatagtatgtccttctggctccacaatgcactgccacgattactgtttctcttccttctgatcttccttctgttccccagtgccagaacttccagaaccttcccgttcagatgccatctttttgtacgccatttcgaagagtttcaatgacgcctgctgtagggaagatgctgcctgc

SEQ ID NO: 2537 - DNA, 594 bp, Mus musculus
tttcttaggaggggaggactttgaccaagctttgttgcggcacattgtcaaggagttcaagagagagacaggggttgatttgaccaaagacaacatggcgcttcagagggttcgggaagctgctgagaaggctaaatgtgaactttcctcatctgtgcagactgacatcaacttgccataccttaccatggatgcttctggaccaaagcatttgaatatgaagctgactcgagctcagtttgaaggcattgtcacagatctaatcaagagaactattgctccgtgtcagaaagctatgcaggatgcagaagtcagcaagagtgacataggagaagtgattctggttggtggcatgacaaggatgcccaaggttcagcagactgtacaagatctttttggcagagccccgagtaaagctgttaatcctgatgaggctgtagccatcggagctgccatccagggaggtgtgttggctggtgacgttacagacgtgctgctcctggatgtcactcccctctctctgggtattgagactctgggaggcgtctttaccaaacttattaataggaacaccactattccaaccaaaaagag

SEQ ID NO: 2538 - DNA, 763 bp, Mus musculus
gaggggtatatactttattgaaaactttaaatactcttcagagagaacatcacatcttcaatcaaggctcttgtgtggcctgcatggaaggaaacctgagctctcgcttgatatggagagatcagttgcagtgctgcctttggctggagtccctcacgacccgtgctcttctgccagcttatcagcctttgccacggcttcttcaatgggtcccaccatgtagaaggcttgttctgggagatggtcatattcacctgctaaaatctgctggaatcctttaatggtctccttcaagggcaccagcttccccatgtgacccgtgaagacctcagcaacttggaatggctgagacaagaagcgctgtatctttcttgcccgggacacagtcaatttatcttcctcagaaagttcatccatacccaagatggcaatgatgtcctggagagatttgtagtcctgcaggattttctgcactcctcgggcgacgtcataatgctcattgccaacaatgttgggatccataattcgagaggtggagtccggtggatccacagctggatagatgcccaactcagcaatagcccgggacaacacagtggtagcatccaaatgggcaaaggtggttgcaggggcagggtcagtcaggtcatcagcaggcacatagatagcctgcaccgaggtgatcgatcccttcttggtggtggtgatctttcctgcattgtgccatgtcggtggctagggtgggctggtagctacagcagaa

SEQ ID NO: 2539 - DNA, 570 bp, Mus musculus
aacgaaccacctggcgctcgagcccgggtagctctgactggtttgaccgttgctgaatacttcagagaccaggagggccaagatgtcctgctgtttattgacaacatcttccgctttacccaggctggctcagaggtgtctgccttattgggcagaatcccttctgctgtaggctaccagcccaccctagccaccgacatgggcacaatgcaggaaaggatcaccaccaccaagaagggatcgatcacctcggtgcaggctatctatgtgcctgctgatgacctgactgaccctgcccctgcaaccacctttgcccatttggatgctaccactgtgttgtcccgggctattgctgagttgggcatctatccagctgtggatccaccggactccacctctcgaattatggatcccaacattgttggcaatgagcattatgacgtcgcccgaggagtgcagaaaatcctgcaggactacaaatctctccaggacatcattgccatcttgggtatggatgaactttctgaggaagataaattgactgtgtcccgggcaagaaagatacagcgc

SEQ ID NO: 2540 - DNA, 768 bp, Mus musculus
gaggggtatatactttattgaaaactttaaatactcttcagagagaacatcacatcttcaatcaaggctcttgtgtggcctgcatggaaggaaacctgagctctcgcttgatatggagagatcagttgcagtgctgcctttggctggagtccctcacgacccgtgctcttctgccagcttatcagcctttgccacggcttcttcaatgggtcccaccatgtagaaggcttgttctgggagatggtcatattcacctgctaaaatctgctggaatcctttaatggtctccttcaagggcaccagcttccccatgtgacccgtgaagacctcagcaacttggaatggctgagacaagaagcgctgtatctttcttgcccgggacacagtcaatttatcttcctcagaaagttcatccatacccaagatggcaatgatgtcctggagagatttgtagtcctgcaggattttctgcactcctcgggcgacgtcataatgctcattgccaacaatgttgggatccataattcgagaggtggagtccggtggatccacagctggatagatgcccaactcagcaatagcccgggacaacacagtggtagcatccaaatgggcaaaggtggttgcaggggcagggtcagtcaggtcatcagcaggcacatagatagcctgcaccgaggtgatcgatcccttcttggtggtggtgatcctttcctgcattgtgcccatgtcggtggctagggtgggctggtagctacagcagaaggg

SEQ ID NO: 2541 - DNA, 570 bp, Mus musculus; identical to SEQ ID NO: 2539

SEQ ID NO: 2542 - DNA, 696 bp, Mus musculus
cgagacagggtttctctgtatagccctggctgtcctggaactcactctgtagaccaggctggcttcgaactcagaaatccgcctgcctctgcctcccaagtgctgggattaaaggcgtgcgcgccgcccggcatcaccagttcttgagtccgatagttttctcaccctggcccttcacgtcttacagttcattccgtttttcagcagcaaacgtcatctgaagtaagaagtcatgggagcagcgctggggagactcagtgttccctgtagcgccacccgtgggcagggctagaggctgctagggctcctgtgtaggacctcaggtgaatctgtggctccttcccggctcgtcgggcttccttgtctgtgggcaccgcagccccggagctccgctgctcagatgaacctgcatgcttgccttcattccagtttgattctagtcagctcccagcttcctcctccgtggagtctcagaacccaggagtgaaattctcaaggctgggacgatgtccacgctgataaatgtcatccccagttgctgaccaattcggtagagctcactctctgcttcctctgtcagggcactagtggcttcatcgagcactgacgagcagcctgcatacttgggctgcaggtagaagagacgggcgaaggagagtctttgcatctcccctggggacaggacatcataccagt

SEQ ID NO: 2543 - DNA, 569 bp, Mus musculus
cgggtttccatattggccccctcctctgacaagcccctgatcaaggacttgagcttgaagatctgtgaggggcagagtctgctcatcacaggcaacacgggcactggcaagacctccctgctgcgggtgctgggaggcctgtgggagggcatgaaaggctcagtgcagatgccggctgattttgggccccacggggtgctgttcctgcctcagaagccattcttcactgatgggacacttcgggagcaggtgatatatcccctgaaggagatctaccctgactcaggttctgcggacgatgagaggattgtgaggttcttggaattggcaggcctgtccagcttggtggcaaggactggaggtctggaccagcaggtggattggaactggtatgatgtcctgtccccaggggagatgcaaagactctccttcgcccgtctcttctacctgcagcccaagtatgcaggctgctcgtcagtgctcgatgaagccactagtgccctgacagaggaagcagagagtgagctctaccgaattggtcagcaactggggatgacatttatcagcgt

SEQ ID NO: 2544 - DNA, 848 bp, Mus musculus
ctctggataaaactttattcagttatttttattaatggtatccatggctctgatactatgatttttaaaaagatgcccatttgaaaaatattttaaaacagttctgttcagctgtaaattctctcttaagctctgaccataattcttgtattttatttgggaagaaaagaactgtttctgatggcataaaatgaacatttttaaagttttttttttaaacttttagtacagaattttatgttaaggactattagtgagaaactgatgcaggtaattgagtgtgaggcactaattcctggtcaactatggaaatctgtttcttctctagtccccccaaggagaaatgtcacaccgagtgtccaacacagtgatcctcaaatatacttctaagcaaaacaagggctttgtttactcagtcttcagattttactgttctgaattttattctgaaactcaagtttaccccaaaccatcattgacatagtagcttcatcaagcacagtagaatgcaagtcctcaaagcagcagtgcaggcagggaggccctatgtacctcccagcttcggggatacacaattgaccacacccaattagcaacaaatctatctcatgctattcgggaggtgtcagtctaagccctgacgacgagacgtggatctctacctatctacacagctcatcttgatgtcctgaggttgccaaagggactcctcacagcttagctttgcccggctgaagctgaaggttctgcagtttcatgcgcagtcccatgttaccagcaatcttcagtttcccttgaaagaatgacgactgaggggtcatttttcagtcatcatagcagcagtctga

SEQ ID NO: 2545 - DNA, 575 bp, Mus musculus
gatagtcgaagccggaaagaggcaggttcccggggcaaaggtggctctgcagcacaatctaggcctcggaggagctgtggttgtcaccctctacaggatgggttttcccgaagctgccagctccttcaggacgcaccaggtttcagctgctcccaccagctctgcaggggatggattcaaggcaaacctcgtctttaaggagattgagaagaagcttgaagaggaaggggaacagttcgtgaagaaaatcggtggcatttttgccttcaaagtgaaagatggccctggaggcaaagaagctacctgggtggtggatgtgaagaatggcaaaggatctgtgcttcccaattcagataagaaggctgactgcacaatcaccatggccgactcagacttgctggctttgatgactggaaaaatgaaccctcagtcggccttctttcaagggaaactgaagattgctggtaacatgggactggccatgaaactacagaaccttcagcttcagccgggcaaagctaagctgtgaggagtccctttggcaacctcaggacatcaagatgagatgtgtagat

SEQ ID NO: 2546 - DNA, 648 bp, Mus musculus
ctctggaaaaaactttattcagttatttttattaatggtatccatggctctgatactatgatttttaaaaagatgcccatttgaaaaatattttaaaacagttctgttcagctgtaaattctctcttaagctctgaccataattcttgtattttatttgggaagaaaagaactgtttctgatggcataaaatgaacatttttaaagttttttttttaaacttttagtacagaattttattttaaggactattagtgagaaactgatgcaggtaattgagtgtgaggcactaattcctggtcaactatggaaatctgtttcttctctagtccccccaaggagaaatgtcacaccgagtgtccaacacagtgatcctcaaatatacttctaagcaaaacaagggctttgtttactcagtcttcagattttactgttctgaattttattctgaaactcaagtttaccccaaaccatcattgacatagtagcttcatcaagcacagtagaatgcaagtcctcaaagcagcagtgcaggcagggaggccctatgtacctcccagcttcgggggaacacaattgaccacacccaattagcaacaaatctatctcatgctattcgggaggtgtcagtctaagccctgacgacgag

SEQ ID NO: 2547 - DNA, 603 bp, Mus musculus
gatagtcgaagccggaaagaggcaggttcccggggcaaaggtggctctgcagcacaatctaggcctcggaggagctgtggttgtcaccctctacaggatgggttttcccgaagctgccagctccttcaggacgcaccaggtttcagctgctcccaccagctctgcaggggatggattcaaggcaaacctcgtctttaaggagattgagaagaagcttgaagaggaaggggaacagttcgtgaagaaaatcggtggcatttttgccttcaaagtgaaagatggccctggaggcaaagaagctacctgggtggtggatgtgaagaatggcaaaggatctgtgcttcccaattcagataagaaggctgactgcacaatcaccatggccgactcagacttgctggctttgatgactggaaaaatgaaccctcagtcggccttctttcaagggaaactgaagattgctggtaacatgggactggccatgaaactacagaaccttcagcttcagccgggcaaagctaagctgtgaggagtccctttggcaacctcaggacatcaagatgagatgtgtagataggtagagatccacgtctcgtcgtcagg

SEQ ID NO: 2548 - DNA, 285 bp, Mus musculus
ggctcagatgcactttaatcgtcaatcaggctgttgcccatagaaccaggctagatgcccctcacgaactgctggtaatcttctagtcacaggagccgtccttccagccgtcacgccaacgctcatctactctcgagcagtcaaaatcaggcttgcccagcttccgattcacctcattgtgcaagcggcacagccactggctaaggatactcgagtgcttgtgtctggctggttcctgcctatcctcttccttatgtcttccgcacattcctcgcggatagtcga

SEQ ID NO: 2549 - DNA, 309 bp, Mus musculus
cgaggaatgtgcggaagacataaggaagaggataggcaggaaccagccagacacaagcactcgagtatccttcagccagtggctgtgccgcttgcacaatgaggtgaatcggaagctgggcaagcctgattttgactgctcgagagtagatgagcgttggcgtgacggctggaaggacggctcctgtgactagaagattaccagcagttcgtgaggggcatctagcctggttctatgggcaacagcctgattgacgattaaagtgcatctgagccaaaaaaaaaaaaaaaaaaaaaaaagggcggccgc

SEQ ID NO: 2550 - DNA, 820 bp, Mus musculus
aaagatttatttatttattatatgtaagtacactgttgctgtcctcagacgccccagaagagggcgccagatctcattacggatggttgtgagccaccatgtggttgctgggatttgaactctggacctcagaagagcagtcagtgctcttaaccgctgagccatctctccagcccctctgtgtgtttcttattagaagcagttgctctgcactcctccacatgcctgcctttcagggaggcatagtgatttttgtctgtcctggggaccttgcaggtcctcagctggggccagacctggctcccgggcctgatgtgctgtgggctaagtctgtgtagcaagcttgtgagtccagggtctggtagcccttgtaagtccccgagatggtagacttggcatgctactatgttcctgatatcctccagagccttctcatcagttccttcccaagttgagtggcctgatcctgagaagcaggctcagccattcacagttcctctcggacccggacccggcggggcttcccagctttctcctggactcgctgaagcttgtgacttgggggttctggggaagggtctctgctgagaatgtcttcctcctcttcttcctcctcttcctcctgcagcagctctttggcttctgtccactcctgttcactgtgctcaggtgcccacgtgtgccacagtgctagggcacagcgccgtccccgagtcacagcccatacaccatggggattctcaccaccagagctgaagggcacaaggcgcccacaccgaggacggacctgaggcgtgacagtgaagggcgttgggctgcg

SEQ ID NO: 2551 - DNA, 609 bp, Mus musculus
  misc_feature (1)..(610): n is g, c, a or t
atgacttcaagggaggcgacctgttcttcacgcagcccaacgccctcactgtcacggctcaggtccgtcctcggtgtgggcgccttgtggccttcagctctggtggtgagaatccccatggtgtatgggctgtgactcggggacggcgctgtgccctagcactgtggcacacgtgggcacctgagcacagtgaacaggagtggacagaagccaaagagctgctgcaggaggaagaggaggaagaagaggaggaagacattctcagcagagacccttccccagaacccccaagtcacaagcttcagcgagtccaggagaaagctgggaagccccgccgggtccgggtccgagaggaactgtgaatggctgagcctgcttctcaggatcaggccactcaacttgggaaggaactgatgagaaggctctggaggatatcaggaacatagtagcatgccaagtctaccatctcggggacttacaagggctaccagaccctggactcacaagcttgctacacagacttagcccacagcacatcaggcccgggagccaggtctggccccagctgagggacctgncaggtccccaggacagacaaaaatcactatg

SEQ ID NO: 2552 - DNA, 661 bp, Mus musculus
aaataaatgaggtttattcagggaacagccatccctcccgctggcctctcctctcttccctccacaggcccagcgctcaggcctctggacatggtgagaggaggtacaccaagtcccggcgttaatgtgctctctatggcagccgcagtccttggaagccgggggagctggagtgcctccatcctgaaggttcccggctcctctattccacacacccttgccaagccctctggcaggaggctgggctgctgtgtttccctctgttaggttcaccgagcccccgagggagaggggaagtccagtttggcagcccggctagtccttgagatcccggcccggatcctggagcaggcgtgcacaggccaaagctggcagctctcgcttacaaaaatggaaagaggcgctttttcacaatataaaggactgtagcgaggaagagggccagggccaggaagatgagcagcttgtccgtcagttctcggcggttgtactttgtgatgagcttccggcccaactggatggttcccgacatggacttaaactcttcgtttgcatccaggagagtccgtggagagctgactagagtctgcatagcctcctcgctctgttgcacctgctgtgacatcatcctgctgatgcccatgagactctggatagtcga

SEQ ID NO: 2553 - DNA, 677 bp, Mus musculus
  misc_feature (1)..(677): n is g, c, a or t
gagtctcatggggatcagcaggatgatgtcacagcaggtgcaacagagcgaggaggctatgcagactctagtcagctcctcacggactctcctggatgcaaacgaagagtttaagtccatgtcgggaaccatccagttgggccggaagctcatcacaaagtacaaccgccgagaactgacggacaagctgctcatcttcctggccctggccctcttcctcgctacagtcctttatattgtgaaaaagcgcctctttccatttttgtaagcgagagctgccagctttggcctgtgcacgcctgctccaggatccgggccgggatctcaaggactagccgggctgccaaactggacttcccctctccctcgggggctcggtgaacctaacagagggaaacacagcagcccagcctcctgccagagggcttggcaagggtgtgtggaatagaggagccgggaaccttcaggatggaggcactccagctcccccggcttccaaggactgcggctgccatagagagcacattaacgccgggacttggtgtacctcctctcaccatgtccagaggcctgagcgctgngcctgtggagggaagagaggagaggcccagcggagggatgggctgttccctgaataaacctcatttatttaaaaaaaaaaaaaaaagggcggccgc

SEQ ID NO: 2554 - DNA, 644 bp, Mus musculus
cagcaattcagcctttactttatttttgaaaataattctgtagattccgttttcttccatgaaactaagatcaggcaacaaacaaggacacacaaatttctcttcagcctgccccctgcatcttggcctgggacgatgtgggaaggctgggaaaggccgaggaccagagccggctcagggccacagatgtcctgatctcagctgctgccaccaggagcaagccctcggggaggagcccctgaagcaaaccccaggggaaagaggcatggagcccactgtcttccactaggccgcccctgaatcctcctaaagaatgcggagagaactaactttcagaaaggaggggggccacaggcaagaagacagggtacccacgcatagactttccatctcccaacaacgcactgctctgctccaggacaagagccacgtcagcagggagagaagccaggaggtagtgccccggcagcagcaatccacgctaactctgacagtgagtccctctgttagtctcatctgaccaaagatccattccttcctccataatccagccccaccctgagggaaggttcagaaagggaggatgggtacataaagagggctcatgggctaacaggggccagatcagggtggagaggcctgct

SEQ ID NO: 2555 - DNA, 530 bp, Mus musculus
gatgacctcaagtctggtgtccccagggctggctaccgtggcattgtcactttccagtttcggggccggcgtgtgcacctggcacccccacagacatggactggctatgatcctagctggaattagcagcacctgcctttccctcctgggtctccttgccgcgtgctgagccgaggcaggcctgcagggcctgggctacaccatcctgccagtgtctccctctcagtgtctccctcttggatctgtagatcttccctttgtgtcctggccagcccccaaatggcattctagtgcacaaatcataggatgagagttatactcctgttgtcaagggagtattgtgtggtatgttcggggcatattgaacaagaaaccactgtgtggtatggggagggttgggcctgttggggccaggtttgtaatgtctccaagggcatctgcagagagcttggcagctccagctctcctcagcaggcctctccaccctgatctggcccctgttagcccatgagccctctttatgtacccat

SEQ ID NO: 2556 - DNA, 798 bp, Mus musculus
ggagtcataaagtttaattttattacaatcatttttaaaaccagctatgatcttgacaaatacaggtaaatctataacaaatctctaatttccaagatacaaaaagacaataaatatagattcaaattcaatctaaaaacaagattctaaatctactttagattaggtagtgtagtttaatttcagtatttcaaatatacgcataattcttaaatgctacaataactcatacaatagttactgctcactgacaagcagctaacagttcttcactgataacacacaagtgtacagcacccgccggggatcccaaagcctgctggtgctcaggggcagttggagatggtgccagatggccaggtcctttctggcaggtcagcggaatgggaacagtgccaaaatcaccctacacaggacaagaaactgattttcccacagtccagcaaatggtcccatttcttgacaaagccagatggctgcctcctatgctgcgccgccatgagcattctgccagccagggtggtgcgggctcagcagcaatgcctctgctcacgccgagtccttcggtccttcattttcttccacggcacattcttcattgcttctgagctatactgtcattaaagtaagccttctgatttttttttcctggataatcatagtatttcttctagctcattaattcttcattaactcaagtttcaggccaagctcctttgtcttggtttaattcttgggtatagtcctagcaagttgcgtggacatatccttcgttatcggtaaggcgcgccaccacca

SEQ ID NO: 2557 - DNA, 549 bp, Mus musculus
agcagctgtgtttgctatgacctacagtgacatgcagactgctgcagacaagtgcgaggaaatggaggaaggctacacgcagtgctcccagtttctctatggcgttcaggagaagatgggcataatgaacaaaggcgtcatttatgcactgtgggattacgagccgcagcatgacgatgagctgctcatgaaagaaggagattgcatgaccgtcatccgcagagaagatgaagaggagatcgagtggtggtgggcgcgccttaacgataaggaaggatatgttccacgcaacttgctaggactatacccaagaattaaaccaagacaaaggagcttggcctgaaacttgagttaatgaagaattaatgagctagaagaaatactatgattatccaggaaaaaaaaatcagaaggcttactttaatgacagtatagctcagaagcaatgaagaatgtgccgtggaagaaaatgaaggaccgaaggactcggcgtgagcagaggcattgctgctgagcccgcaccaccctggctggcagaatgctcatggc

SEQ ID NO: 2558 - DNA, 478 bp, Mus musculus
atttgaccactctttattatgtgcgttggctcaggccctaagtgtaccaggtgaagccgaagttggcattgctcatctcctccttggtgcgcaacccatacatctcgccaatgaggggtggcacccatcgtgtggtatggaacacagactcgcccaccttccagttgggcacatccttcatgatgatggcttcctcctccaggttttcccggagaatctgcagggtcctccggtccttctctgcctggaagagcggcatgagggcgatcctggcctccaagtcctcaatcagcaggcgcctgcgctcctggttccacctcatcattctccagtagccaaagatcaaggccccgatgcccacagcaaacatgttgtaccccgacagtccccggcgggacaggttccgcttgtagtcgatggggccgtagccccgtggcgggggcatgtcctgcttcaccttcgacgccgggatagtcga

SEQ ID NO: 2559 - DNA, 522 bp, Mus musculus
  misc_feature (1)..(522): n is g, c, a or t
ggcgtcgaaggtgaagcaggacatgcccccgccagggggctacggccccatcgactacaagcggaacctgccccgccggggactgtcggggtacaacatgtttgctgtgggcatcggggccttgatctttggctactggagaatgatgaggtggaaccaggagcgcaggcgcctgctgattgaggacttggaggccaggatcgccctcatgccgctcttccaggcagagaaggaccggaggaccctgcagattctccgggaaaacctggaggaggaagccatcatcatgaaggatgtgcccaactggaaggtgggcgagtctgtgttccataccacacgatgggtgccacccctcattggcgagatgtatgggttgcgcaccaaggaggagatgagcaatgccaacttcggcttcacctggtacacttagggcctgagccaacgcacataataaagagtggtcaaataaaanaaaaaaaaaaaaaaaaaaaaaaaaaaaaaggggcggccgcacggccctgt

SEQ ID NO: 2560 - DNA, 458 bp, Mus musculus
catttcacacggtcttttaatcggcttcgggaagccaaagaaactgcgtacaagaattcctcagccattgggaatacaacatcgatggagtatgcatgttttttttaaaaaaggacaatataaataaacatttccacagcctcccggactgctatgctccccatgggcttgagacatgtgcccgatgggcaggacctgctgcaactccgcagccgggctggggagctggagggccatggcttgctcaaatcgagtccattccatctcaggagggggggggcgccagacttcaggggcgaccacacaaaaaaagaaaaaaaaagaaaagccacaaccaaaaaacctgaaaaaacaaaaacgagtaaccaaaacccacacaacccgacaatttaaaaaaaacaaaaacccatggctcatggtaaacagtaaaatctgaagtgctttccaaaacgttttta

SEQ ID NO: 2561 - DNA, 526 bp, Mus musculus
cagagactactatgccagccggagtcagggtggcagctatggttatcggagctcgggagggtcctacagagacagctatgacagttatgctacacacaacgagtaaaagccctccgcgtccagatcgtccttccatggctgtaattaagatgggggagcttcgctgatcgttgtgtagtgagcaccttgttcccacttttgtagtcctttccgttctgacccgtcagcagcctgcttctgacccaagatggcctcgtgactagacctgtttttaaggaagcgctgtctgtttttaagtattcttaaaaacgttttggaaagcacttcagattttactgtttaccatgagccatgggtttttgttttttctaaattgtcgggttgtgtgggttttggttactcgtttttgttttttcaggttttttggttgtggcttttctttttttttctttttttgtgtggtcgcccctgaagtctggcgccccacccctcctgagatggaatggactcgatttgagcaagccat

SEQ ID NO: 2562 - DNA, 506 bp, Mus musculus
ctgtttgaagagcaaagttttagagaaagtgattattacaaatccttcaaggatcccaaagactttcaaatccatttaaatccaaatatagaagagcagattctgctttgacatagtttttacatttttagaataacatttcattacaaattcaggcaagaattagttatgaggggaaaggaggttgatatgatgaaatatgttggagactatacatatatgtatgtgcatatatgtatgtgtatatgtatgtatgtgtatatatgtctatatatgcatgcatgtatgtgtatgtgcatatatatgtgtatgtatatatatgtatgtgtgtgtgtatatatatatatatacatatatatatgtatgtatatatgtgtgtgtgtatacacacatatatgcaggaaaagattagaataaaatgataattattacattagttatttctttgtgttttacaaatggcctagtctataaccatgtaatttttatattaagaacttattcac

SEQ ID NO: 2563 - DNA, 590 bp, Mus musculus
ctgcatcaaacacaaaacacgatggtacctactcttttcccgagtccatggctacgggagtgtgagtgagttggagcggtcacctggcactgcttctgttgacagtgtagccactgtccactgccactgtggtgactgcaagagtctcatctccctccctggaaactgaaacaagtgcatgtttcaagagtgctaagattccccgggcgcatagcctaataaacgtgtgcaagttcagtctttgctgtgtacgccttcatttgagtccacagtgcctcagggaaggggactctgccttcttcctgtctccagggacagtgccaccaggaaatgctactgatggatatgggcttagctccccaggggccaaggaaccttccagtgccatcctaatcttgactgagtgctattttataaagttgactgtgtctgatagccttgaattttctttgtgaataagttcttaatataaaaattacatggttatagactaggccatttgtaaaacacaaagaaataactaatgtaataattatcattttattctaatcttttcctgcatatatgtgtgtatacacacacacatatat

SEQ ID NO: 2564 - DNA, 450 bp, Mus musculus
cctattgccgaagatttattgttgaagaataaataatgttctcaaggaagaattagcccttctggtaacttggaagagatgcagcccagatccaggtatgcacactgggccagctggactttgagtctggaaaggagagatgcatagacccctgtggttgatgacccccccccgggtgggggagcagagaggagtgctataatgtcccccagggcacatgtgacaatgtctgaagacatttttggctggcagatctcaggaggggtgctcctggcagctggcaggtagaggacagagacagcttaaaaccctctacaatacacgaggcagtcccatgacaggattatacaaccgcacatgtcagtagtacagtggcagagaagccctgttcttgagaggcctgggagtcccagggcacaatccctaaccacagatgaaggggccaggcag

SEQ ID NO: 2565 - DNA, 473 bp, Mus musculus
ccgtgacaaacttgagcaccgattccgctggctgcgcttcatggtggaggtgaagaacgacctgactgccaagaaaatggtcacggctttgatggagatggcacaccggaaccaccgtgccctggactgctttgtggtggtcatcctctctcatggctgccaggccagccacctccagttcccgggtgctgtctatgggacagatggatgctccgtgtccattgagaaaattgtgaatatcttcaacgggagcggctgccccagcctgggagggaagcccaagctcttcttcatccaggcctgcggtggtgagcagaaagaccatggctttgaggtggcctgcacttcctctcaaggcaggaccttggacagtgactctgagccagatgctgtcccctatcaggaaggcccaaggcccttggaccagctggatgctgtgtcaagtttgcctacccccagtgacatccttgtgt

SEQ ID NO: 2566 - DNA, 361 bp, Mus musculus
attttaaaaacactttattgtttttctgattacatggcaaatataaaaatccaaacattacaaaatatataaaatgcccatttcaaaaataaactcaggttgggcgggggggcacacacctttaatcccagcactcgggaggcaaaggttggctggtctatatagggaactccagtccagccagagctacatagtgagacccggtctcagagaaaaagcagaatgaagtattataaaatacatgatgtaggaaattgtacttggggatcaatctcagccctgctgaatcccccagggttacagggtgtcatttcctcaaaccatgcacaagctgacacacatttacaaaaccaaatgccag

SEQ ID NO: 2567 - DNA, 515 bp, Mus musculus
caccacagttccgggcaggaacgttacaagtccagtgtcgctacggtaccgcagccctgcaatgtgcgcggtgctccgccaacccaaatgcgtcaagttgcgagccctacatagcgcctgcaagttcggcgtggcggcccggagctgccaggagctgctgcgtaagggctgcgtccgcttccagctcccgatgcccggttcccggctgtgcctgtacgaagatggcacggaggtgacggacgactgcttcccgggccttcccaacgacgctgagctcctattgctcaccgctggcgagacctggcatggctatgtgagtgacatcacacgtttcctcagtgtgtttaatgagccacatgccggcgtcatccaggctgcacggcaactgctgtcagatgagcaggccccactgaggcaaaagctgctggccgatcttctgcatcacgtgagccagaatattactgcagagacccgggagcaggacccatcctggtttgaagatcccaatacttctc

SEQ ID NO: 2568 - DNA, 384 bp, Mus musculus
aaggaagataaaggtagcactttatttcattagtctgagactggggacacaggctacagtctggccactgaagcctaagcaaccagcgcatgggactggaggctggtgtacaccttgggacagtacgtggagcggctctagaatggggtggggtggggaggagagtattggggtatgatctggcttggtcatccccagtagcttgctcctagccagggacaagagacagtggctgcttgagcagaggccacggctagtgtttgtgacatgatgcagctatgggtggcaaagggatctggggatgatgtgggcaactgtagaccaagagctagctcaaggtctgggggctgcatgtgagaagctgcaggtacaggctaggccgag

SEQ ID NO: 2569 - DNA, 535 bp, Mus musculus
ggagatctgagcggctgctgcagcaccgggctcctcaactgagaaggaggctgaccatggaagacctcggggagaacaccacagtcctctcctccctgagatctctgaacaacttcatttctcagcgaatggagggatcatcaggcctggatgtgtccacgtctgcctcagggtccctacagaagcagtatgagtatcacatgcagctggaggaaagagcagagcagatccgctcaaagtcctacctcatccaagtggagcgggagaagatgcagatggagctgagccacaagagagcccgagtggagctggagagagcagccagcaccaatgccaggaactacgagcgcgaggtagatcgcaaccaggagctcctggcacgcattcgacagctccaggagtgtgaggccacagcagaagagaagatgcgggagcagctggagcgccacaggctgtgcaagcaaaacctggatgctgtcagtcagcagctgcgggaacaggaggacagcctggcttcggccagggagatgattag

SEQ ID NO: 2570 - DNA, 490 bp, Mus musculus
ctgtgtcctcctttattatgattagagtccatagtcctctgcccactcattcggagtccagagcccaggaaacctctaggcagttctgccagatcctggggcttaccaagagcaaagttttagacggactgcccagctcacaaagagcaacagggcttcagctgcccaagtgtgtgtgtagccaaagcacagtgttcatgaagctgtctgattccacctccacctctgacagcgcatgggtgctcttgggatacagcaggagccggacaggcacattccgggccttgagggcatggtaatactccagaccctgcttgaagggtacacgccggtcctcctggcccagcatcagtaacactggtgtctttacctgagggatgtacttgatgggtgatttatccagcatctcttccaacacattcaggtctggcaggtagtcattactataagggaagccagtctccaccatacaccaatcagggatgtcagt

SEQ ID NO: 2571 - DNA, 518 bp, Mus musculus
ggagaaactatggtttccaaaagcatccctgtgctctgcgtgctggatatcgagagtggtaacatctccgtgcttgagggcgtccctgaaaatgtgtcccctggtcaggctttctgggcccctggagacacgggtgtggtgtttgtgggctggtggcacgaacccttccggctaggtatccgctactgcaccaatcgcaggtcagccctgtactatgtggacctgagcggggggaagtgtgaactactctcggatgagtccctggctgtctgctctcctcggctgagcccagaccagtgtcgcgtcgtctacctgcagtacccatctctagcccctcatcaccagtgcagccagctcttcctgtatgaccggtacaccaaggtcacctcattggtggtggacattgtacctcggcagctgggagagagcttctctgggatctactgcagcctccttcctttgggatgctggtcagctgacagccagagggtggtcttcgactcggtccagcgcagtcg

SEQ ID NO: 2572 - DNA, 481 bp, Mus musculus
catttgtaatgtttttaattcatgtgtctacttcagctataatgaaacctaggtttcccataggtgtgtgcactctttatagatgcaccgtaggaaatatagacaaatgtaacaaattatgatgaaatcaagactttataacaaagtactttaggagttagacaacatagttaaggctgattatattaaatttctaacccaaatacaaaagaatagagcctactgatgctagtcttttaactgaattttccctgattcctaatttccctgctcctttcacgcattaaaacctcagaaagagtttgaatccactgaaaatataggaattctttttttaaaaagaatcaattagaaggtgaagatcacaattctctttacaagtacagtctgctccttagcagcctgtaagccattgacaaagtaactccatagccaacaaaaaatgccaagcccctgtttggctgaggaaggggagtcaagt

SEQ ID NO: 2573 - DNA, 539 bp, Mus musculus
ttggtgaaaagtcccagaagtgcacaggctcggcaggacaacttgcagcccttctccctggattcagtcatttgaagactgagaccaagattggaagcatggccgacctcaggcagctcatggacaatgaggtgttgatggcctttacctcctatgcaacgatcattcttaccaagatgatgttcatgagctctgcgaccgcattccagaggataaccaacaaggtttttgccaacccagaagactgcgctggctttggcaagggagagaatgccaagaagtttgttcgcactgacgagaaggtggaacgcgtgcgcagagcccacctgaatgatcttgaaaacatcgttccctttctcggcatcggcctcctgtactccctgagtggaccagatctctctacagccctcatgcacttcagaatctttgtaggtgctcggatctaccacaccattgcttacttgactccccttcctcagccaaacaggggcttggcattttttgttggctatggagttactttgtcaatggcttacagg

SEQ ID NO: 2574 - DNA, 445 bp, Mus musculus
gtccaaaactcttgactttatttttagcagtggaatgaagagttctggtcacctaggcagcagcctcctgcctcgcagccttcctttcttccagcatcctctgcttctgcttttccagacactttctggcagaatagtaggctcccaggtccaagtagcggtcctggtaggctttagtcactttggtgaactgctccagttccttggcacagttctgctggtagttctctccctccctctgctgacaagccttcagtctctcctggatgatgttcatgatctcctggtcaactttgaagtcccttctccactgcatctcagcctcatagatacacagaacatcaccctctttgcattctgtgatgtctggcactcgacggtactgtcggtggtagtagtaggttcggttcttggcatgctgtcgttcaataaactctctcacgag

SEQ ID NO: 2575 - DNA, 488 bp, Mus musculus
ggagcgagtagaaggtcggtggggagagtttgcttaagccatgccagattcttgggacaaggatgtgtacccggagcccccgagccgcacgcctgctccctcgccgcagacctcgctccctaaccccatcacctatttgacgaaggcctacgacctcgtcgtggactggcccgtgaccctcgtgagagagtttattgaacgacagcatgccaagaaccgaacctactactaccaccgacagtaccgtcgagtgccagacatcacagaatgcaaagagggtgatgttctgtgtatctatgaggctgagatgcagtggagaagggacttcaaagttgaccaggagatcatgaacatcatccaggagagactgaaggcttgtcagcagagggagggagagaactaccagcagaactgtgccaaggaactggagcagttcaccaaagtgactaaagcctaccaggaccgctacttggacctgggagcctact

SEQ ID NO: 2576 - DNA, 250 bp, Mus musculus
agagaaagggaggcggggggggggaaagaaaaggaattttttttataggctcatgtgtgggaatgcttggctcatagggagtagcactattaggaggggtggccttgttggaggaagtttgtcactgggagtgcaagatctgagattttggatgttcaagtccagggccatgggctcacagttctattcctgctaccttcagatcaagatgtagaactgttagctacctctccagtgccatgtgctgcca

SEQ ID NO: 2577 - DNA, 696 bp, Mus musculus
gatagtcgagccatctcctccctccttcccatcccccttctcttcaagcgtgaggctcgtgatccttccgccgcttcccttcttcattgactcggaaaaaaatccccgaggaaaaatataatactcagagtacttattttcaatcaagtatttgccctcgttcacgtgatatatatatatttttaaggattccactccaccctttttctcctcttccaggaaagggaggtgaaagaattgtatttttctcccagctctaaatcatctatgtgttaaatatccgtaccgatctgtcttgaagaaatacatagctccttttttttttccttcttcttaaatagctatacaaaaggagtgaaaagccaagagaacgaagtctttctttctctttcttgcgggagaacttaatgctgcatttatcattaacctagcaccctaacataaaacaaaaggaagaaaaggattaaggaaggaaaaggtgattcaagaagagccatcatgtcggggcgaccgagaaccacctcctttgcggagagctgcaagccagtgcagcagccttcagcttttggtagcatgaaagttagcagagataaagatggcagcaatgtaaccacagtagtggcaactcctggccagggtcctgacaggccacaggaagtcagttatacagacacgaaagtgattggaaatggatca

SEQ ID NO: 2578 - DNA, 550 bp, Mus musculus
gctgcagaaagacctttactgggcagatgggggtgttgagataccagtggacagagtgagaggatagcatgtcctccagaggcgcgggggtagtgtccctgcctgggagcctaagcctgaatgccttatgggctggcaccacagacgggctcaggggaggcccgcccacaagggcttcgggcccctccttcatagagacaccacccctgacctggggtacacggccatcgcgctcacagttgtcttggctggtctcaggagcactgtgggatgggcttgggggctcaggagggtccttcaggaaggaagaaggaggctggtggtgtgtagtgtgggcatgtgggagatgctggccccaagaatgatgttcaggtttgagcagaaccattggacctagaacttgtgtttcctttgggctcatttggaacagaaagctgaaaaaaatatgagggtgttgtgccaagccgtaaacacagatggaccatccctgggtttcaagcaggcagatacgtggctgtgtagccatgcacacactgggacaattgtcacg

SEQ ID NO: 2579 - DNA, 205 bp, Mus musculus
gccaccccaagacgcgccccagcccgccatggcccggatcctccgggcatcctgccttctgtccctgctcctggccgggtttgttccgccgggccggggacaagagaagtctaagacagactgccatggcggtatgagtggtaccatctacgagtatggagccctcaccatcgatggggaggaatacattccttttaagcagtat

SEQ ID NO: 2580 - DNA, 407 bp, Mus musculus
  misc_feature (1)..(407): N IS G, C, A OR T
atattgagaatgtgatactgactcagctttattcaaaaataaaagcagcaccaagacagagatcgactgtccgatgcatgtgaaatagtaagcgacaaaaggctaggttggtaagccttngtggtggggttccagttaccaggggaagagcacaggccatcacagaaatgcttctgggaaacactgaccatggtgtttagtgatctaaactcccatgctgcaggcagcctccggggcagcaagaagctactctgagaaaacactttgagagtttccatgcattcaaaggtgacatttttttggtcactgctctggcaagattaaccagctgcctaacaagtgtgcactcccaggaggaagaggtaggatgctgacccatcatgtccatctctagtccctcaaggcct

SEQ ID NO: 2581 - DNA, 720 bp, Mus musculus
  misc_feature (1)..(720): n is g, c, a or t
cgcaaccgtgggcgacgggtccggtactgaggaggcctgccggaacatggaatctaaagaagaatttgttaaagtcagaaagaaggacctggaacggctgacgacggaagtgatgcaaatacgggacttcttacccagaatactaaatggggagttactggaaagtttccagaaattaaagatggtagaaaaaaacctggaaagaaaagaacaagaattagagcaactgataatggaccgtgaacacttcaaagcccggctagaaactgcacaggcagacagtgggagggagaagaaggagaagttggctcttcgacagcagctgaatgaggcaaaacagcagctcctccagcaggcagagtattgcacacaaatgggagctgtcacctgtaccctcctctggggggtttccagcagcgaggaggtcgtcaaaaccattctaggaggagacaaagcattgaagtttttcaacataactggccagacgatggagagttttgtgaagtcattggatggggatgtcaaggaggttgattctgatgaaaatcaatttgtctttgcactggctggaattgtaacaaatgttgccgccattgcgtgtggtcgtgaattcttggtgaattccagccgggtgctcctggacaccatgttgcagctgctgngggacttaaagcctggccagtgcaccaaactcaaagttctaatgctgatgtccctgta

SEQ ID NO: 2582 - DNA, 454 bp, Mus musculus
aagaaggaaccggtgcttggtgtttgagttcacatcagagctatccacagaaacgtctcaattagaggaaagctcactgccaacgcctgtgaagaagacacgggggcgtgactgtttttgagtggcgtcatcacctgacagacatcagaacgaatgccagttttccagaatccttggctactcagctccacggtgacttctcgccgcatcgtgttcttctgccgtattttctggagcgcttcctccctctgagccagcttctgcttgtcagtttgtttgactttgggactgtttgctaggaggtggcgaagtttcacatagcttttccataatttctgatactgtgggtctcctgcataactcaactgtgcggggcggctcccaaagtgaacgataatcgggaaagtgatcacttcggggttgaactgttcacgatccagctgatcaatgcgga

SEQ ID NO: 2583 - DNA, 744 bp, Mus musculus
cagagagcgggatcgagagagacacaggcaccgggaggcccgcagatcaccgtctctagaaaggtcctacaagaaagagtataagagatctggaaggagttacgctttaccagttgctcctgagcccgctgggtgcacaccagagttgcctggggagatgattaaaactacagagtcttgggccccgcccccggagaatgtgaatcatcgttctccaagcagggagaagaagagagctcgttgggaggaggaaaaagacagatggagcgacagccagggctctggcaaagagaagaactacacgtccatcaaagagaaagaggcagaggaggtgcctccagagaagacggaggaggaggaggaagagctccttaagcctgtgtggattcgctgtacacattcggaaagctattactccagtgacccaatggatcaggtgggagacccgactgtcgtagggacaagcaggctccgtgatttgtatgacaaatttgaggaagaattggggaataggcaagagaaggccaaagctgcccggcctccgtgggagcctccgaagacaaagctggatgaagatttagagagttccagtgagtctgaatgtgagactgacgacgacagcacctgttcgagcagctcggactcggaggtgttcgatgtcattgcagagattaaacgcaaaaaggctcaccctgaccggcttcatgatgaactctggtacaacgacccaggccagatgaacga

SEQ ID NO: 2584 - DNA, 545 bp, Mus musculus
  misc_feature (1)..(545): n is g, c, a or t
aaaaggtcaattttattttattggttttgacagagaggactcacccaatggcttctattcttttccacactaagtccttccctatcctggggcatctccccacaactacccagcctctattttttttttctacccactatacagctctattcctaaccagtgggatccccaaatccaggccctcagcagtgggggcgtgtgctgagcaccaggcagagggagctgaggccagctccagccttctccagttctgagcaggacacaggtaccagggtgacatcagagagcttctgcagagcctcctggctgttgggcaggtctccacctccgcggtgcaggaggaaaggtgtggtaccaggcaacccaggacgcagaaagagacagtcactagctgcatcatctgggagggtcagagaggcgtaggggtgatcagtcagcgctgccattgccctgactgctttttgggcagcctcgctgcttccagccaccacggtgcgaggnccccccatgccacagaggccgcgcaggtgcgaggagcctgagac

SEQ ID NO: 2585 - DNA, 655 bp, Mus musculus
cccccgccccatcgtcgtacgtgagctcgcctaccctgggaacccctcaaaagcccgagctatccgtctctccagcttgaggactcagactcccatcttcattaactctctcctctgggggtggggccaaggctgaaatcacaaggctgcaggagtggaggtggccgctgaccagtgaagtcaagagaaaaaacaaaacagcttggctggaaggggcttcggtgtggatgtgatggggacgccgggggaggggctgggtcgttgttcccatgccctgatccggggtgtccccgagagcttggcatccggggaaggtgctggcgctggtcttccggctctggacctggctaaagctcaaagggagcatggagtactaggaggtaaactgaggcaacgactagggctgcagctgcttgaactgcctcctgaggagtcactgccgctgggaccactgcttggtgacacggctgtgatccaaggagacacggccctaatcacaaggccctggagcccagcacgtaggcctgaggttgatggagtgcgtaaagccctccaggacttgggactccgaattgtggagatgggggatgagaatgcgacgctggacggcaccgacgtcctcttcaccggccgggagtttttcgtaggcctctcc

SEQ ID NO: 2586 - DNA, 573 bp, Mus musculus
  misc_feature (1)..(580): n is g, c, a or t
tnnnttttnnnnnnnnnngngnnnnannngcttcccactaacaaatctttatttcattcatgaaatcattaagtcatccactcacctccctgcccagtaattcaaaaggaaaagcccaagttagtaaagaaaaattttttttttgactcccctaagnttttacaaaatatgttaaaggttgaaaaatgttttaagtttgtaattcctagtaagaaaacattatctgaatgaacacgctaatggcaaaccactgtaaaatgcctcagccgcatttgatgtagagggtagggattatcttcgaagcgccccagctctcccggtgaggtcagaggtacactggtttgtattattgcaacatccaggaagtgagctaagctgttcttcattcagcaagggctctgacattacgattggcctccaaacttggctgacaatttactgatgagattcataaccttcgggttgctctgatattttgacatatttgatgggttctgggccacatcctggaaagccaccatgacttctggatcctgcatggctgcaagaacctctggatcactgaggatttcg

SEQ ID NO: 2587 - DNA, 688 bp, Mus musculus
agcctcccaccatggatccccgcaaagtgagcgagcttcgggccttcgtgaagatgtgtaggcaggacccgagcgtcctgcacaccgaggaaatgcgcttcctgagggagtgggtggagagcatgggggggaaagtaccacctgctactcataaagctaagtcagaagaaaacaccaaggaagaaaaaagagacaagacgacagaggaaaacataaagacagaggagctatcaagcgaggagagcgatctagaaattgacaatgaaggtgtaattgaaccagacactgatgcccctcaggaaatgggagatgaaaatgcagagataaccgaggagatgatggatgaagcaaatgagaagaagggggctgccattgaagccctaaatgatggtgagctccagaaagccattgacttgttcacagacgccgccaagctaaatcctcgcttggctattctgtacgccaagagagccagtgtctttgtcaaactacagaagccaaatgctgccatccgagactgtgacagagccattgaaataaaccctgattccgctcagccatacaaatggcgagggaaagcacacagactcttgggtcactgggaggaagcagctcatgaccttgcccttgcctgtaaactggattatgacgaggatgccagtgcaatgctgagagaagtccaacctcg

SEQ ID NO: 2588 - DNA, 113 bp, Mus musculus
accagctctcagtggaaatcgggggtttggccaagggggcaatttctaagtgactgcatactgggctattgccacaactgtgctgacccgggacaggaggaagacacctaggg

SEQ ID NO: 2589 - DNA, 225 bp, Mus musculus
gccaatgtggctggcaatgttcatggagggaccattctgaagatgattgaggaggccggggccatcatcagcacgcggcactgtaacagccagaatggggagcgctgtgtggctgccctggcacgggtggagcgtactgacttcctgtcacccatgtgcatcggcgaggtggctcatgtcagtgcagagatcacctacacttccaagcactctgtggaggtccag

SEQ ID NO: 2590 - DNA, 419 bp, Mus musculus
  misc_feature (1)..(420): n is g, c, a or t
aaaaagggtagaattaatattttattgtcatttataatcagatggcagttgggtatagactctccacacttcatagttttttgcaaattaaaaaaggtacaggttttaaacagctggtagcgtgntacacttttcagagcatgattaggcatattcagtaatagaggcttcaagcttttccttgttagcaccggagaactcccccaccttttgaccctttttataaaactggaaggtcggcatgcatttgacttcacagtctgcagcaacatcctggcagtcatccacatccacttcaaggaacaccacattggaatacttgtcacagagggaatggaagaagggcttgatcattttgcaaggtccacaccacgtagcagagaagtccaccacgacaagcttgtctcccgcggcggcca

SEQ ID NO: 2591 - DNA, 551 bp, Mus musculus
  misc_feature (1)..(551): n is g, c, a or t
ttggatccatttccatctggttctgctgagacgcgtgtggctccctccccgcaacagccaaaatggtgaagctgatcgagagcaaggaagcttttcaggaggccctggccgccgcgggagacaagcttgtcgtggtggacttctctgctacgtggtgtggaccttgcaaaatgatcaagcccttcttccattccctctgtgacaagtattccaatgtggtgttccttgaagtggatgtggatgactgccaggatgttgctgcagactgtgaagtcaaatgcatgccgaccttccagttttataaaaagggtcaaaaggtgggggagttctccggtgctaacaaggaaaagcttgaagcctctattactgaatatgcctaatcatgctctgaaaagtgtaaccagctaccagctgtttaaaacctgtaccttttttaatttgcaaaaaactatgaagtgtggagagtctatacccaactgccatctgattataaatgacaataaaatattaattctaccctttttaaaaaaaaaaaaaaaagggcggccgcn

SEQ ID NO: 2592 - DNA, 523 bp, Mus musculus
  misc_feature (1)..(550): n is g, c, a or t
gacatttcaaaactggctttaaacattcatcagggtgccacacgagggctctgggggtgagagaattgttacacgtatgaagctgggatgccctaagacacaaaaagggaacccattngataaggctgctggggtgtccccacccctaccacaaaaccagagagtagaattgaggccctctgtgaaggcctctcagggctatgtaggagccagtcctcccttggaggtagatcatccgggagggaactgaggagtggctcccacggtggcgggggtcaggcagcggcttcctcagtggtactgctggtagttgggataacctggggccggagatccctctttcggggttagctggctggggtcctccaagaatgggggtgcatttcggaactgctgggcagtatagcgggtgagaaggatgccaacaccctcaatgagggccaacaggatgcctcccatcatcgcagagcccaccatggccagcggaccactgcgcgcagccagcacagctccagtcaacgct

SEQ ID NO: 2593 - DNA, 588 bp, Mus musculus
agcgggagggggacggggggagtgtctcgcccgcgccaccgactgcgccaggccggactctggcgccatggaggagtacgctcgcgaaccttgcccatggcgaattgtggatgattgcggtggagctttcaccatgggtgtcattggtggtggagtcttccaggctatcaagggcttccgcaatgcccctgttggaattcgacaccggttcagaggtagtgtcaatgctgtgaggatccgggcaccccagattggaggaagctttgcagtgtggggaggtctgttctccaccatcgactgtggcctggtccggctacggagcaaagaagacccctggaattccatcagcagtggagcgttgactggagctgtgctggctgcgcgcagtggtccgctggccatggtgggctctgcgatgatgggaggcatcctgttggccctcattgagggtgttggcatccttctcacccgctatactgcccagcagttccgaaatgcacccccattcttggaggaccccagccagctaaccccgaaagagggatctccggccccaggttatcccaactaccagcagtaccactgagg

SEQ ID NO: 2594 - DNA, 623 bp, Mus musculus
cacaaataggactttttatttgtcactattaaaaatctggattttacactgattcttggactggcggttcatatccgtcagctcgctcaaccttagcacccgtctcgtctccagctgctttgcctgagttgccgccttccccatgcagctccatgagcttgcccaattcaaacttgggtttcttcagcatttttacttttctaacaaagacgtcatggagaggataaatggactggcaagccttttctatgtctttcccaatgctgtctggaatcagtttattaactacttccttcaagtcattagtctgcacctctcgggtcatgatttccatcatcttcttccggatctggcggacttgctggtgctgcgcataggatgtctttcttatctggttgttgcgttttttagtgaagccaacacagaaaagtcggagcaaatacccatcggtcgtcttgacatcaacgtgagcttcgatcatggtctgccacttcttgaccatggagcacattttgtcccgggtaagatccataccatggaagttagtcagacagtttttgccctgaacgtcctcagtgattagcttgaattttctaaacgcaacttcatcattctgtagatca

SEQ ID NO: 2595 - DNA, 706 bp, Mus musculus
cggtcggcaccatggcggtcggcaagaacaagcgcctgacgaaaggtggcaagaagggagctaagaagaaagtggtcgatccattttctacgaaagactggtacgatgtgaaagctccagccatgttcaatattaggaacatcgggaagacactagtcacgaggactcaaggaaccaaaattgcctctgatggcctcaagggtcgtgtgtttgaagtgagccttgctgatctacagaatgatgaagttgcgtttagaaaattcaagctaatcactgaggacgttcagggcaaaaactgtctgactaacttccatggtatggatcttacccgggacaaaatgtgctccatggtcaagaagtggcagaccatgatcgaagctcacgttgatgtcaagacgaccgatgggtatttgctccgacttttctgtgttggcttcactaagaaacgcaacaaccagataagaaagacatcctatgcgcagcaccagcaagtccgccagatccggaagaagatgatggaaatcatgacccgagaggtgcagactaatgacttgaaggaagtagttaataaactgattccagacagcattgggaaagacatagaaaaggcttgccagtccatttatcctctccatgacgtctttgttagaaaagtaaaaatgctgaagaaacccaagtttgaattgggcaagctcatggagctgca

SEQ ID NO: 2596 - DNA, 710 bp, Mus musculus
cacacaaaccaccagcatttatttcctgggcctaagtatcagtctcttggtacaaagggcaaagaattggtcagttagttttgagtccaaatcctttcccaaaactggatctgtgaggctccatgaggaaacttagagctgcatagatcatcagaactgagctttaaacggctttcaaaacaaaaccaaaaccaaaaaccaaaacagaagaaaagtgattgtcagctcccctctctctctgaaaaagttatgtttttaaaaaatgtaaaagaggctttaaaaaagggctaggaagatctccctgacagacaggctggctggagggtgagtggtgacaggacagtccctgtccaggtggcggctgctcacctaggggcagggcctggctcgagccccgcctagctgaataaataacatctcatggtgctggtgtcttcagagtgaacctgggcaccgtggggaggtggggaagggtggagcctgtgctgtgggtggaggacttggctggagtgggggccacagaggactccatgaggctctcagtccgcctggctggccagggctccagtccgagaggtacagtaggtctcttccagccttgcgaccacaggcagactcaggatggaggtgttcgcatcactgctctcaggctggctgctggcttccttgtcgggggtacttccctctgcctatcccggatagtcgagcga

SEQ ID NO: 2597 - DNA, 719 bp, Mus musculus
gataggcagagggaagtacccccgacaaggaagccagcagccagcctgagagcagtgatgcgaacacctcatcctgagtctgcctgtggtcgcaaggctggaagagacctactgtacctctcggactggagccctggccagccaggcggactgagagcctcatggagtcctctgtggcccccactccagccaagtcctccacccacagcacaggctccacccttccccacctccccacggtgcccaggttcactctgaagacaccagcaccatgagatgttatttattcagctaggcggggctcgagccaggccctgcccctaggtgagcagccgccacctggacagggactgtcctgtcaccactcaccctccagccagcctgtctgtcagggagatcttcctagcccttttttaaagcctcttttacattttttaaaaacataactttttcagagagagaggggagctgacaatcacttttcttctgttttggtttttggttttggttttgttttgaaagccgtttaaagctcagttctgatgatctatgcagctctaagtttcctcatggagcctcacagatccagttttgggaaaggatttggactcaaaactaactgaccaattctttgccctttgtaccaagagactgatacttaggccccaggaataaatgctggtggtttgtgtgaaaaaaaaaaaaaaaaaaaaagggcg

SEQ ID NO: 2598 - DNA, 652 bp, Mus musculus
  misc_feature (1)..(652): n is g, c, a or t
ggtgggcaactatgtatttattgtgtttgggaggcagagtgagggagaaaccccagccagtaggaagaagactgcgtccagtctagagttcctggtgaaaagcaggaaggtttctgctatacccatcacagaatgagagagggggctcaatagatcattcccttggtttctccacggggcttcttgagcttctcaaagttcttcaggatgatgtcatataacacagcataagcatttcggatctccatgaccatcagacggatctcctggtactccgcctcgtccagctcgtgcaccagctgccgatagtcacccacgtggggctgcttggctgctttggccacggcgtcacccctctcggagaagtacttggagatctgcgtgtggaagccttccagcttggtgtgaaggttggtcatcagctcaaacaccttttcctggacagccacgccaaaattattcccaccctctatccgaggtatctgtagctgcaaccaggtagtgaccagattgagttgctcagtgacatccttgatctcaggttttaggcgttgcaggaggaccacaatcttctcattgcagttcactgggccacaggggggacctttgtcgtcttcgncccctttcttcttctcttccttctcttccttct

SEQ ID NO: 2599 - DNA, 547 bp, Mus musculus
gcccaccccaggttcctcgtgcggcgctcaccaccaccccccggctctggccatggccacactgagggtccatcccgaagcccaagccaaggtggatgtgttccgtgaagacctgtgtagcaagacagagaacctgcttgggagctattttcccaagaaaatctcagagttggatgcgttcttaaaggagccagctctcaatgaagccaacctgagcaatctgaaggctccattggacatcccagtacccgatccagtcaaagagaaagagaaggaggagcggaagaagcaacaggagaaggaagagaaggaagagaagaagaaaggggacgaagacgacaaaggtcccccctgtggcccagtgaactgcaatgagaagattgtggtcctcctgcaacgcctaaaacctgagatcaaggatgtcactgagcaactcaatctggtcactacctggttgcagctacagatacctcggatagagggtgggaataattttggcgtggctgtccaggaaaaggtgtttgagctgatgaccaaccttcacacc

SEQ ID NO: 2600 - DNA, 608 bp, Mus musculus
ctcctttgtcattttaattgaagcactgctaatcactcttttaaaacctttaaaagcaccaaattttaatatctaagtcaatttgggggtgagaggggagaaacactatcaggaacttctctccagaacaaaacaatgatgttcattcctccacatgtccaaattaaaggtctactgaaaccaaaatgaaaacccaaaccccacacagagaaaaaaaaatactaaaatcacattctagggggtcagtgcattctgcagtctttgctgggctgtctaattgtccttcggctgactttttaaaattaacatcctaactcatcaaaatatacatttttcccattggcttttttaaattaaaaataataattaaaagtgaaaaccactagaaggaattcatgagcagttgcctggcacatttgatggcatatacggcatatggaggtcaggaaggtggctcgcagcacacgtcattctcatctttaaggcttagctttcttccaaacagtgtaaaacacccacaattccaagtatgaagggacacagacaatctcttttgagaattccacaggacaatacagacgccccagctgttcttcatagagcgacag

SEQ ID NO: 2601 - DNA, 572 bp, Mus musculus
ccggcccgcagcctgacacgccgcgcggtccctcagtctcctgcggtcgcctccccaggcatggcacagggcctcgccacactatggcagcagcaagacacagcacgctcgacttcaagctcggcgccaaagctgatggtgaggccattctgaaaggccttcagtccatttttcaggagcaggggatgacagagtcagtgcacacctggcaggaccatggatatttagcaacttacacgaacaagaatggcagctttgccaatttgcgaatttatccacatggattggtgttgctggaccttcagagttacgacagtgatgtgcaaggcaaacaagaaactgacagccttttgaacaaaatagaagaaaaaatgaaagaattgagtcaagacagtactgggcgggtgaagcgattaccacccatagttcgcggaggggccattgacagatactggcctactgctgatgggcgcctggttgagtatgacatagatgaagtggtgtatgatgaagattcaccatatcagaacatcaaaatcctacactcgaagcagtttgggaatattctcatc

SEQ ID NO: 2602 - DNA, 538 bp, Mus musculus
ataagaaactactctttattatttttaaagacaatctcaaaactatttttagatcctcccacttcctgcccttaaccctcatccttttatttgagtaggtttgagaaaggaaaaggaaaaacaggcagtgggtgaattctgtggtgctaatggtgctttcatgaaaacagtcatttctccaaacccgtgctctagaggacccatctagaacatgctgagatctcagcatgggcactagggagtccatgctcaactgtaggaaatgggggatcagggtggtttcttctttaacaatcaaagttatcatctgtttaataggagggaaaagaagtctacaatattccccaatcattttcttgaggaatcaaatcagcagcagtttgatgtatgctggtaaataggatgtagggtaggaatgccaaagccccacctttttagactatttctcccgttctttgcaatggtgtgacatttatgccacttataatattaagggcaagaacagacacctggttttcacttctatactccctcacta

SEQ ID NO: 2603 - DNA, 650 bp, Mus musculus
tggtttggattttacagaagtggccaagctaaggaaaccattcccctccaggagagcactctatacacagaggaccgcctggggctaaagaaaatggacaaagcaggaaagctagtgtttctggctaaggaaggggaccatcttcaaatatctaaagaatggtttactgcccacatcataccttttcttaagtgaagccctggcactttatagcagagttcatgaaaccacagctcttccaagccatgtacatagttcatgctcagccctgaactctaatctagcctgcaaccagcccttctctcctcttatcatctaacataccctacttggaaagatctaagatctcaatcttatcctttgccgcctgctatcaccatatggtgttggattcaagtttaattagctaataaccatggagattgttttacaactttgtgatatggtcaagctcccgtttaagaaatgggagtctgttgttgcagatcagtaattgtgcctaaaagagacagaagtgaaaaagagacaagctctgagggcaaaacccatacaaatttggagcaaataaaagcccaggtctgagatgttcacacaagcaatttctctgcactgctgtgtgggccgtgcatgatgtttccccatcatttctt

SEQ ID NO: 2604 - DNA, 530 bp, Mus musculus
acaggtgtgcatggcacagatttattccataaaattcttcatagcacttttcctttatagacttaagatccaggatatctttaaaaggttttatgttgtgctcagtttttaaaaaaaaaaaatacaaaagcaatcaccaggatttatgacatattccgtgtgctagaggagaagcaccattaagtcctggcagccaaagcctgagacttcatttacaaatgtagaggacagtcacaatagaaagagcccaggaactattaggagggagcacggggccatttccctctgaggcggggcagctccatccctggcggactccaggatcacacatcccagcacacagctaagtggtaacctggggtagacacccagggattcaagtgcccccaggccctcaattaacattaaaccgtttgacccattcaaacactgtgctggtaagacccagaaacagtcggggacacccgacagcagaggggacttgccatagcagagagctcttggctgtctggacaattcactcaccattc

SEQ ID NO: 2605 - DNA, 654 bp, Mus musculus
caccgctgatccgctccacgccttgcgctctccgctctcagccaaagcccggcagccccggccacgcagctccgcaaccatgtccaagctggcgcggctcgagcgcgaggagatcatggagtgccaggtgatgtgggagcctgacagcaagaaggacacgcagatggaccgctcccgggcggccgtgggtaccgcctgcggcctggcgcttgggaattacaatgacttataccactggtctgtccggtcgtatatggacttttgggctgagttctggaagttcagtggaatcgtctactcacgcatgtatgatgaggttgtggacacatccaaagggattgcagatgtccccgagtggttcagaggcagccgcctcaactacgcagagaacctcctgcggcacaaggagaacgacagagtcgccctttacgtggcccgggaaggcagagaggagatcgtgaaggtgacttttgaagagctgcggcagcaggtggctctgttcgcagctgccatgaggaagatgggcgtgaagaaaggggaccgtgtggtcggctatctacccaacagtgcgcatgcggtggaggccatgctggctgctgccagtattggggccatttggagttctacctcgccggactatggtgtgaatggtgt

SEQ ID NO: 2606 - DNA, 422 bp, Mus musculus
agagcaagtataccattctggatttttattttgataaagcttaagttacaggaactcaaccttcgcacgcccatccttccttctgctgtgaggaacttggctcccaggcagttccgaaccctatggaaagactcaagcttctaagtcacacacagcatcaggatctgttggccaatgaggcttttccctctgctgtttcctcacgctgggggaaaggggaaagctgggatctctgcccagtcaaggcacagatgcaaggtatctgcttcttgatgaagctgcccagcccttctcctagccagaaccttctctgagccaggtcccctcctgaacccatgttcttgggagctatgaaggcagtatgctgtgagaagggcccaactagggacaggttgggaatgtggtactgattatgatgggac

SEQ ID NO: 2607 - DNA, 531 bp, Mus musculus
gagtctcgaactaagaggaagtttcatggtcctggcccccaacactgaaagataggtgtgtgagttctctgggcatgggttctaatcatagacagccacatgtgcttccctcctcacagaggagaggcagctgtttgttatagcacagacaaccggcctctgaaaggggaccctgcaccttttgaggctttctcctttcctggacgctcatgcttatgcaggctaagtgttccaggtagagggacagcctccaagcaatcgacaagttgccaagatctcatgagaactggcttttaccaggtagcctttgaaagacatgtctgtccagcagggttctgggaaccacatgtttctaagtgtcccatcataatcagtaccacattcccaacctgtccctagttgggcccttctcacagcatactgccttcatagctcccaagaacatgggttcaggaggggacctggctcagagaaggttctggctaggagaagggctgggcagcttcatcaagaagcagataccttgcatct

SEQ ID NO: 2608 - DNA, 487 bp, Mus musculus
gtcattaaaaaactttatttttttttacaaaggataaccccactttggggtgaaaatatatttggataagtagaaaatatagtttttaatcatacaaaaagatacacaaaatacaaaaacaacaaaaccgaaacctccatcagctcgcagacattctggctgcacagttctcaggtggagctgacacaggacaaagtgctaaggcttagtgagcttccgagccagggctgaggccacagtgaaagcagcactttctcccaacactggacaggaaatggggtctgggggcttctgtgccccgatcagtgctggggcatctcaatgtagaatgtcacccaggctccagctgtcaaccacaacccttcacaggattagtgttagaattacacaagtctgtgcgttgggagaaagcctcaaaagcaataaccaagctgggcctttgatcgcagcactcaggaggcagaggcaggtggatctctcaggccag

SEQ ID NO: 2609 - DNA, 475 bp, Mus musculus
tcggggtttccagagtttctccagttgcggaagacagctgttatttttctcctgaaagcttttggcacagccggcaggctgaaacttccaggcaccttttggaaaagttgttagggtttgtttgaagctttctttacattttcgtttgggttttcaagccctgactttacggaggcgagctcttcgtttgctttgaagggttcttaaagattttttcctctccggctttcgtttttcttgaacccactcggctcaatcatggtgatgttcaagaagatcaagtcttttgaggtggtcttcaacgaccccgagaaggtgtacggcagcggggagaaggtggccggacgggtaatagtggaagtgtgtgaagttacccgagtcaaagccgtcaggatcctggcttgcggcgtggccaaggtcctgtggatgcaagggtctcagcagtgcaaacagactttggactacttgcgctatg

SEQ ID NO: 2610 - DNA, 492 bp, Mus musculus
aacacagacacgtttattggcaaaacctattcccaagcacggcggtgggggaagagcgttggcagagtgggcggcacgatccccattctctttggtaatgttcaaggagcaggcaaggcaggagaggatggggtgtgcccaaaacatggcaaacgcttttcttagaccttgtgggtcaatcctcccagctccctacaaggtaggtacatccctgccctcatttctagaacgtggaaacaagcgttctgtggtgatgtgccaggagggcaggcatgtgctttcaaatcccccgagaatctcccactgcaagcctcctgctgcctgctcactcggattttctgtttctctcacaagttctagttctttcaactttttttaaaaatattatctttttgtaaaaaaaaaatagatgtttatccatattttgagcaagccactgtctcctactccaatgggtcaaagcttgggttccccccaagattcagcttagct

SEQ ID NO: 2611 - DNA, 525 bp, Mus musculus
gggacttcggggtccccatctccatcctgataatggtcctggtggattccttcatcaagggcacctacacacagaaactctccgtgcctgatggcctcaaagtgtccaactcctccgcccggggctgggtcatccaccctctggggctgtatagacttttccccacgtggatgatgtttgcctccgttctgcccgccctgcttgtcttcattctcattttccttgagtctcagatcaccacgctgattgtcagtaaaccagaacggaagatgatcaagggctctggcttccacctggacctgttgctggtcgttggcatgggtggggtggctgccctctttgggatgccttggctcagtgccaccactgtaagatctgttacccacgccaatgccctcacagtcatggggaaggccagtggtccaggggctgcagcccagatccaagaggtcaaggaacagcggatcagtgggctcctggtctctgtgcttgtgggactgtccatcctcatggaacctatcctgt

SEQ ID NO: 2612 - DNA, 519 bp, Mus musculus
aggttaagaatttatttgctttaaagcctgagtgaacatttgactttacacatatttcaaatgaccatgcatcctggactccagggggtcactgacaggattccaaagcaacaaccagcagcaaaccaaagctggttaaggttttcaagtctgcgggaccacagtaatgctagtttcctgggactgagacctaagccaagaagagacacttgtcaggtgatgtctgcatgacttttaaatcagtaatttaagatgtgaagagtggggatgggcttctcagacactaagagtcttcttgtcagaatcatgtgcccttacacatagagggaaggcttcgctttgcttagccccatttaccgggagcttctaatcttctctcaagttctaggatcttcacaaaaaactaaagtcttattagaaaatataaaaccatatttaaataagatcttcaaagtgccattgccttcacagacattttacagttattaaattaatgaatctatttatagatgagacatg

SEQ ID NO: 2613 - DNA, 661 bp, Mus musculus
gccagttaaagcctggtggaagattgatattgccagtcggtcctgcaggaggaaaccaaatgttggagcagtatgacaagctacaagatggcagtgtcaaaatgaaacctctcatgggggtgatatacgtgcctttaacagataaagaaaagcagtggtccagggatgaactgtgaaagcaacgtgagcttgaccagtctataaaccgcagtgggccgctcctctcggtccttacagcatttgagaaccaacagcatcacagcttgttttggactttgttacactcttactttcagcatgaaaacgtgtggttttgtaggatttcctaattccaaacggcgcggagccaaactgatagaggaaggctgcagagcgttaactgcgtgtgttgttttaacatgcccacatttcactttaaaaaaatattaaaagaaagagttctccaactggaaaaattagttttgaagagtggctttgcttttcttgggcacttaattctgttccaatattaattcatcagatttattttgtgcatcagataacaccacattcacaagtttagcttctttggtagccaatgtctgttagatgctactaagaaaacagagatgagctttcttcttaaaagcctttgatgtggcgtcataggatagcatgtcgt

SEQ ID NO: 2614 - DNA, 463 bp, Mus musculus
aaagcaaatacatgatttattggaattgggttaaaggtgtttcacggagaggagattcggaattacaaaattctgagtcccccgatgcaaggcactcctccaggtggataagctgtggacaccactggacaggaccattttgggttttatgtcttgtcctatttctggcaagccatcttcctgcctctcatccaatccagaggatgcgaaaagaatgcttaccacatatacttaaacagtctctacaataaacacagcaggctagcatggatagcttttatttacctaccccaactccttttacatgtgagtaacctgcggtctaccttgcccctctcccattcagagtcagcataaatccccgggccatagaggttggagtaaccacttaactaggccactgcccaaatgacctagaagacccctccccatggagaacaggaagagtgcagagaaggcagtc

SEQ ID NO: 2615 - DNA, 546 bp, Mus musculus
gctgctgggatgtatttggaacattatctggacagtattgaaaacctcccgtttgaattacagagaaactttcagctcatgagggacctagaccaaaggacagaggacctgaaggctgaaattgacaagttggccactgaatatatgagtagcgcccgcagcctgagctccgaggagaagctggcccttctcagacagatccaggaggcctatggcaagtgcaaggaatttggtgacgacaaggtgcagctggccatgcagacctatgagatggtagacaaacacattcggcggctggacacagacctggcccgttttgaggctgatctgaaggagaaacagatcgagtccagtgactatgacagctcttctagcaaaggccggacccaaaaggagaaaaaagctgccagagcccgttccaaagggaaaaactcagatgaagaagcccccaaggctgcccagaagaagttaaaacttgtgcgcacaagtcctgagtgtgggatgccctcagtgacctttggcagtgtccacccctctgatgtgttg

SEQ ID NO: 2616 - DNA, 475 bp, Mus musculus
actagttctgtggatggaaggctgcttggctctccagggctcttttaatacacacaaataagagtctgtagtggaaacaacttttaaaatgaacacctccaaatgctgtagtccccagggctggggcaagtctgtgtggaggagtctgcagaggcaggggtcttgtcagagtgagcacagaacacgtcaaccgagtgtgtcttgccaaggcttctttgcgtttgctttgatgctgctgttgttgctgttgggagctttcggggggtgacttggatcatgctgcagcagagggttgtgcgtaaaagtctgtcgtaagggacccctggcagccaggtccaagtgtttctgcattcgctgctcccgctctcggagctgctgtgcaatttcagcgttcttccagccttttttgaagctcttcaagaagccttccctaggaggcaatttgtcagggtcatgtacgactcgctgggggatc

SEQ ID NO: 2617 - DNA, 632 bp, Mus musculus
ctgccgtggtggggagccattgccacgtgtactgtccttgcccgatgcctcgtttttcctctcattgtgaagggccagcgagaagcagccaagatccacaaccacatgccagagatgcggaagttttccgctcgaatcagagaggccaagttggccggagaccaggctgagttttacaaggccaccatagagatgacacgctatcagaaaaagcatgatattaaactcttgagaccgctcatcctacctctcactcaggcccccgtcttcatctccttctttattgccttgagagagatggctaacctgcctgtgcccagcctccagacaggtgggctctggtggttccaagatctcaccgtgtctgatcccatctacgtcttgccactggtagtcactgccacaatgtggtgtgtccttgagctaggtgctgagacaggtgttcagagcaatgaccttcagttcatgaggaacattatcagggtgatgcccctggtggtcttgcctgtgaccatccacttcccctcggcagtgttcatgtactggctgtcctccaacgtgttctccctgtgccaagtagcctgcctccggattccagctgtgcgcacagtgctgaagatcccccagcgagt

SEQ ID NO: 2618 - DNA, 535 bp, Mus musculus
gatggaactgagataaaccctttatttatttatgcttttccattttgtttaaaacaacaacaacaaccttaatataactgacagcccttccccctcacccttggttgggttgggggttattagtggggaaacagcccccagggatggggctgaccataagagcccctcagggaggtaacggagcccaagtccttggcctggggcaagggcacctgtagtgtgtagtaactggggacttaacagggctcatgaacctcaacttgtaccaacatacacacccttggctgacaagggtcaggaagcatgtagggaggggactcccactttcctctgtgttcctacccagctcagtctcacaacttaaggctgggagcaggaaaatggagggtgggcaggtatctcacacaaatgagtactgattattaatggctcgggggtgacccccttcttctccgttgccccctagtggtagctgctggagctgtaccattagggacacctccaagtccccactagagccagcaccaccctgagc

SEQ ID NO: 2619 - DNA, 624 bp, Mus musculus
gacagttggtagggcattggctaatgatggcacatcccctggggagagatggactcatcgatttgagaggctgaggctaagtcgtggagggggaaccctgaaagacggagcaggaatgatacagagagaagagctgctgagtttcatgggggctgaagaggctgcccctgacccagcaggagtgggtcgtggaggaggggcagctgggctgacctcaggaggaggagggcagcctcagtggcaaaagtgtcgcttactgctccggagtgaaggagaaggaggaggaggaagtcgcttggagttctttgtaccacccaaggcgtcccgaccccgtctcagcattccctgctctactattactgatgtccgcacagccacagccctagagatgcctgacagggagaacacgtttgtggttaaggtagaaggcccttcagagtacatcctggagacaagtgatgcgcttcatgtgaaggcctgggtgtctgacatccaggaatgcctaagccccggaccctgtcctgctatcagcccccgtcccatgacccttcccctggcccctgagacctccttcttcacaaaggataacacagacagcctggagttgccctgcctgaatcattc

SEQ ID NO: 2620 - DNA, 542 bp, Mus musculus
  misc_feature (1)..(542): n is g, c, a or t
gaccgtaaagcgactggagtttattgccgcgataccgttaagtagctacagagcgcagctcctctctttctctttaaatgccatcttaccacaggcatctaaagcaacagcagcagctacaaaatggtgtctgaataattctgagttcaaaacaagatctgtgtacaggcagaataaaaagatgttcaattaatagtgtgccatggaccggaacaaaacatctgcaactgggagttttgtgtaaaccgtaatagagatgcgactcacagagaccaacagtaaattcttgtttccttgtacagtttagtgaggtggtctgtgttcttgcaaacgacttacaaagtacaagaaatgttgcatgtgggcactaggcataaaatatttcatttccttacacaaggcatagcagtggtacagggaacccagtgggtaccccgccatctctcttccaaagatgaacctcccagaacggcagtagatgcctggcagcaagccacccatgacaactttttnttggttgtttaaaatacaagcacattctc

SEQ ID NO: 2621 - DNA, 683 bp, Mus musculus
tagtgtgtaccgtatctgtaggtgtcctgtacataattctaaggggaaactacgcaagaggctgagggcttgcctcccaccacgtcggggggttacagccgaggagggcaatctgagaatgtgcttgtattttaaacaaccaaaaaaagttgtcatgggtggcttgctgccaggcatctactgccgttctgggaggttcatctttggaagagagatggcggggtacccactgggttccctgtaccactgctatgccttgtgtaaggaaatgaaatattttatgcctagtgcccacatgcaacatttcttgtactttgtaagtcgtttgcaagaacacagaccacctcactaaactgtacaaggaaacaagaatttactgttggtctctgtgagtcgcatctctattacggtttacacaaaactcccagttgcagatgttttgttccggtccatggcacactattaattgaacatctttttattctgcctgtacacagatcttgttttgaactcagaattattcagacaccattttgtagctgctgctgttgctttagatgcctgtggtaagatggcatttaaagagaaagagaggagctgcgctctgtagctacttaacggtatcgcggcaataaactccagtcgctttacggtcaaaaaaaaaaaaaaaaaagggcggcccg

SEQ ID NO: 2622 - DNA, 515 bp, Mus musculus
ctgtttcaaacattttattgcaagatgctttagttaattacaagtttaaattataacttggtaatttcagttgggcagcaagttgctgcaagttgcttattcaaattatgatcagataactccgcatacagagcaaggatcagaaataccttactggctaatagggttaagccactaagtggaccttgatcattttatttcaatagatagcaatacagaaagagttcttcacatatactagttcccatttaactctctctggctatcacaactgagaaagacatattcacataattggctgagcttgagccttctttgcaagcagctttagatcttcaatgcacttggcaatggtctccttttcctgctgtacagaaatgctcttcaccacatgcttttctacccagtctatcatgtgttcttcctccttgcgacgcatcatgttctgtacagagatgtggtagtccaggcgattctttacctccttatatgctttatgtagccgttcccggtaa

SEQ ID NO: 2623 - DNA, 628 bp, Mus musculus
aggacagcctcgccttgcccctctaccacctcttcctgaatatggaggaaaagtgcgtcttgggctgattcctgaggaatttttccagttcctttaccctaagactggtgtaacaggaccttatgtgcttggaactggacttagcttgtattttctatccaaagaaatatatgtgattaccccagagaccttctctaccatatcagtagtagggttgatagtctatgtgattaagaaatatggcgcctcttttggagaatttattgacaaacttaatgaggaaaaaattgctcaactagaagaagtaaagcagtcgagcatgaaacaaatccaggatgcaatcgacatggagaaggcacagcaggcactggttcagaagcgccattacctcttcgatgtgcagaggaataacattgccctggccttggaggtcacttaccgggaacggctacataaagcatataaggaggtaaagaatcgcctggactaccacatctctgtacagaacatgatgcgtcgcaaggaggaagaacacatgatagactgggtagaaaagcatgtggtgaagagcatttctgtacagcaggaaaaggagaccattgccaagtgcattgaagatctaaagctg

SEQ ID NO: 2624 - DNA, 556 bp, Mus musculus
aagctcttggaggtttatttcattaaaaaccaaaccaaaacagacttttccccgacaggagtgtaccctcacagcagcagcaatcacaaggcacgtatgaaatagaaacattaaaaatgtcacagatcacttaagaagatgccgacccatggttcacatgaacgcacatcagaaaatgacatttaaatgacctgactcctctgcccgtgcaacaagagaaggccttccatgcacacgatccgtggcacatgtcacaagcctttatatcactcaacacgctcgctaaggacaacggcagccagtgtagagctcggaaatcacgtttagagcatccctatttttcggaggcatctggaatttatagagtgaaagaggaaaggtctcatttttctcagcttagaaaaagcccacaggtctatgctcctggacaaaaccaccatgaaaaaggacattggacatattagaaaataccaagggcatgatttgtatttggggatcagaataataaccctcttcccaaaactgactagagaatatataaaaaatataaagtcaa

SEQ ID NO: 2625 - DNA, 533 bp, Mus musculus
gatgacagatgacagcatatccctggtgtttctgcagtgccgtgtgctctgtcaggatgcttcactgtcatttgtattcgcttttgtttaaaactggagcttccattttccctctgtcgtctgtgggaatgattcaataagcacttctccgtatccatagaaaaggactttgcagctaagagggactctccatgtatccagttactgtgggagactgagagactgtgtcctcccctgtcctcaggcagagctcagtggtggctgctatgcagatactctgtgtgtgttataaacgtcatacaacatggtgatcctaggactctatgtgctccagttactgatactgtcctgtctaatctgagcttcactaacagatcttcataccgcttcctaagcgataatctgaatcaaacgttattttatttttgtgtaattgactttatattttttatatattctctagtcagttttgggaagagggttattattctgatccccaaatacaaatcatgcccttggtattttctaatatg

SEQ ID NO: 2626 - DNA, 540 bp, Mus musculus
attttctgagacagtgtttctctgtatagccctggctgtcctggaactcactttgtagaccaggctggcctcgaactcagaaatccgcctgtctctgcctccggagtgctgggattaaaggcgtgcaccaccacacccggccagattcaactcttttaagactttttgttttgctaaaaaagcaatagtgcttcgattatacctttgaatctcttccccctcccttttgttgttgttttgttttctgtttgtatgtcttttgttttttgagacagggtctcaatatgaagctctgggtgttctggaccttacctccaactcagagagctgcctgtctctgcttccgagtgctgggattaagagtgtgtgccaccacacccagtttttttcttcctcttcgtctccaaatataaaactctcaatatcgtttcaaaaaaaacctattactatatgcatatactctttaatttctcctatgattatttctgatctgccattaagtatttcataaactgtaagggttaggcttttccctctgaa

SEQ ID NO: 2627 - DNA, 637 bp, Mus musculus
  misc_feature (1)..(640): n is g, c, a or t
gagagcacctagcgccgccaccgcgctgctgccggaggtccaggccaggtggacggaagacacggtgagccagcccctctcccctaggcaacccacacaacacggggtctggagatgctgagatcaatgtggaattttctgaaacgtcacaaaaagaaatgcatcttcctgggcacagtcctcggaggtgagtgacaacatgctttttagaaggggccattggcagaaaggagtgacagaggtgacttataaaaacaggcagggcccactgataccaaactgggatttgtcgaagggattggctcaaccgtcaaagaagaacctctaaagttcttttatctggatctctgtgccctttgcccctcactctgcccccgtcctttttctccccatgggccttcaagagtctaccccaatgaagtttcttttcaaagcactattctcgtatagatagatacatttgccttccaattttcttcttttgctttcctgttagattttcattctgtttgtcaactctgctttcaacctttcacacgagtttcgaaatattctagggccattatcttaagtctgctctttganggtggtgtttaaaggtaaaccgaaaacagcatgttgctgtaaaatatacagc

SEQ ID NO: 2628 - DNA, 547 bp, Mus musculus
aagttatataagtttatttattccgattccaatgtttacaaattaaaagatttcattttagtagagtcaattcataggcacttggtagcacagatttcaccggaagaaacaagaaggacggacagtgatggttaagatctgaatggcctcaaagataggcctttcccccaaaaaacaagctcacaggtatttgcccaccactccaggagtcctggtgtggggtaaagaaagacagaacatttcctgtcaggcccagaatgtaggctaaggctcgaggctgcaggctgcaaatgttcccaggcaggcaagacctcacgtcctactggctgctgcccttgggtgcatctgtaggccccgtggctcctgcccctggggttcaacaccgataaacatagaatactcattttcagaagacctgagggaatgagtctaagcaacgctttttacaaaaagtggcaaggttcaggaaaaaaaaaaaaaagatgttgctccaaggcaccaagggtgtaattttttttcagaaaaagtcagagaacagactaaacta

SEQ ID NO: 2629 - DNA, 604 bp, Mus musculus
gatgagtttgtggagaagaccctgagctgcctttcaaccagcaccgatgcggcatccgtggtgcacagcacagacctggtggtggaggccattgtggagaacctgaagctgaagaacgagctgttccagaggctggacaagttcgctgcagaacacaccatctttgccagcaacacgtcttctttgcagatcacaaacatagccaatgccaccaccagacaagaccgatttgctggcctccactttttcaaccccgtgcctatgatgaagcttgtggaggtcatcaaaacaccgatgaccagccagaagacatttgaatctctggtggacttttgtaaaaccttaggaaagcatcctgtctcttgcaaggacactcctggattcatcgtgaaccgactcttggtgccatacctcattgaggccgtcaggctacacgagcgaggcgatgcgtctaaggaagacatcgatacagcgatgaagctgggagctgggtatcccatgggtccgtttgagcttcttgactatgttggactggatactacaaagttcatcttggacgggtggcatgaaatggagccagagaaccccttatttcagcccagcc

SEQ ID NO: 2630 - DNA, 557 bp, Mus musculus
gactgaaaataatgtagaaaactttatttatgttcccagcacagagcaaaacaaacaaaaccagactctatgtaaacaaaagaatagcagctgctcagtagcagcttctcctttcaataaattaaacggttgagaacaatgcttaatgtttcacaagttccccttcagtctactttaatatttctcttctatatcacataagcagacttttttggaagatgtgagactatcactggattcaaattatacatgatgaaaagaaaaaccaggggggaaaaagagcatgtaaatatgcttacagtgtaacttaatatccacaataaggaattttcttttaacatttagggggaatgaggattggtgggatccttggggccacaagaaaaggaggcaacagaatatgaaaagcagcagcttttgctctgccacgaggaagctggcacctgtcaaccaggccctgcaattcaaactccagcttttaaggtagctacggaaggctgaggaccagttgggggagaacgaatgttacagcctgccctgctaataaactcatgggt

SEQ ID NO: 2631 - DNA, 641 bp, Mus musculus
  misc_feature (1)..(641): n is g, c, a or t
tctggccacctttctgtaccacctgcgcattgaggcagaagtggaagtggtggagatgcacgacagtgacatatctgcctatacatatgagcgcaccctgatgatggagcagaggtcccagatgcttcggcatatgcggctgtccaaaacagagcgagacagggaggcacagctggtgaaagatcgaaactcaatgctacgcttgaccagcattggctctgatgaggacgaagagacagaaacgtaccaggagaaggtgcacatgacttggaccaaggataaatacatggcatcccgggggcaaaaggtcaagtcaatggaaggattccaggacctacttaatatgcgtccggaccagtccaacgtgagacggatgcatacagcagtgaagctcaatgaagttatagtcaacaagtctcatgaagcaaagctggttttgttgaatatgccaggaccaccccggaaccctgaaggtgatgaaaactacatggaatttctagaagtgctcactgagggattagaacgagtccttcttgtccggggtggtggcagtgaggtcatcaccatttactcataatcagctgtgggagattctgcgtggtccaacttccctaagactcatcgtncatggagatgatagc

SEQ ID NO: 2632 - DNA, 653 bp, Mus musculus
ctctgtccatttaaaatgttttatttttcttttaaactagattgtgaagtgccattgaataggcaatgttggcaaaacaatgtctgttacaataaaatacattagacatttaaataaataaccttaaaaactaggcgaagggacagaaacccagtcgattggatctggagcaatgttttctgcacaagcgagacaggcaaacctctcgtgaagacggatgtaaacagaaccatcagacctacagaagaagccgagcaggctggggtgggctgggggtgacagaggctgagggtgcaggaagtggcaaaccaaaaatactgactgaggtagcaggactctgctcagtgcagaaaaattggcttatgaataaaaattagactgtgataccaaattaaatccagagaatcatgcaaaagacacaatacatgctatttagttttttttcttttaaaaaccacacacattcatttcctaagtctgctgccaattaatttgctgacaatgtctgctggctcaactatctttgtacaagtatgagtattaaacagaacactgtacatgctttttcatctacaaaaaaatatctgcataaaatagtgttagttctctgtacacgtcgatggacactttaattatgtgtataaaaaaaggaa

SEQ ID NO: 2633 - DNA, 559 bp, Mus musculus
tttgtgctgctcattatgcccctggtggtctgggtctacagcacagacactaactttagcgatatgttctggtcttgactgacagcgctacatacagaagatgtttaacttaatcaattaattttttattgtttaaagcaactgtctatttctgctgaattttcacatgaacatattggctggtgaaggaggtttcatatctagattttgttttgctttttctgactccagtgggacaagattttcctttttttatacacataattaaagtgtccatcgacgtgtacagagaactaacactattttatgcagatatttttttgtagatgaaaaagcatgtacagtgttctgtttaatactcatacttgtacaaagatagttgagccagcagacattgtcagcaaattaattggcagcagacttaggaaatgaatgtgtgtggtttttaaaagaaaaaaaactaaatagcatgtattgtgtcttttgcatgattctctggatttaatttggtatcacagtctaatttttattcataagccaatttttctgcactgagcag

SEQ ID NO: 2634 - DNA, 628 bp, Mus musculus
caactcttcagattacagtttaatggtttgagggtagcagatgagtctgagactcagaccacacagggaatgtttattgcgcaatcccaatcactccacaggccaagcggctcccagcatttccagtctttggactttcttcatttccacctttgcccaagtcatcttgtttctcatggaccaccattgtacggccaatgatggaatgctctcctgagagtgagatcacacgatcttcaatggacacattggccacaccgtcctttccagcagtcacattgcccaggtctccaacatgcctctcttcatccgccgggccaccatgtttcttagagtgaggattaaaatgaggtcctgcactggtacagccttgtgtattgtccccatactgatggacgcggaacccatgctggccttcagttaatcctgtaatttgtcctgacaacacaactggttcaccgcttgccttctgctcgaagtggatggttccctgcaccggaccgtcgcccttcagcacgcacaccgctttcatcgccatgcttccccgggagacgcgcggcggcctcctccggagggaccagagagagcaagacgagaagccgacggacggaaggcgcggatagtcgac

SEQ ID NO: 2635 - DNA, 652 bp, Mus musculus
  misc_feature (1)..(652): n is g, c, a or t
cgccttccgtccgtcggcttctcgtcttgctctctctggtccctccggaggaggccgccgcgcgtctcccggggaagcatggcgatgaaagcggtgtgcgtgctgaagggcgacggtccggtgcagggaaccatccacttcgagcagaaggcaagcggtgaaccagttgtgttgtcaggacaaattacaggattaactgaaggccagcatgggttccgcgtccatcagtatggggacaatacacaaggctgtaccagtgcaggacctcattttaatcctcactctaagaaacatggtggcccggcggatgaagagaggcatgttggagacctgggcaatgtgactgctggaaaggacggtgtggccaatgtgtccattgaagatcgtgtgatctcactctcaggagagcattccatcattggccgtacaatgngtggtccatgagaaacaagatgacttgggcaaaggtggaaatgaagaaagtacaaagactggaaatgctgggagccgcttggcctgtggagtgattgggattgcgcagtaacattccctgtgtggtctgagtctcagactcatctgctaccctcaaaccattaaactgggtatctgaagagttgaaaaaaaaaaaaaaaaaaaaaaaagggcggccgcg

SEQ ID NO: 2636 - DNA, 62 bp, Mus musculus
cccaaaaaagcatatggggctgttttattatagaaggcagtaaaaaaaaattttttgggggt

SEQ ID NO: 2637 - DNA, 504 bp, Mus musculus
gttcttgtaattgctcatttctaggttctgtttttggcaaggacaggttgactggtggcccagggagagatttctgtttccaaccagagttcagggtgcagcccccccactggtaggcagaggcacaccccccaaagccaccaagtgtccagtgcagaaaggtggtgggacaacccccgaaccgtgtggaattgtccttctcgttccttccccatggtctgacgttcatgcatgtgtattactgggtcccaggaccagcctttgttcacgtaggtagttacgctgttttccatcttgggaagccaggaaagttctggaacactcttaccacgtgtcctcgttttctctgcacatggggtcgaggctggagacatccacacgtcgccctgcctggtgcattgtgtcacttgtgcttccctgcaaaagaagttgatcttgagtccccaagtagaacttagcctaacctgtgggagagcagcagggttgctgccagccgtctgtctg

SEQ ID NO: 2638 - DNA, 692 bp, Mus musculus
ctttctttctttctttctcaatagtaaagaaagttctgatttaaaacctgccacgatgaactgtttgcaaactgttctgggggtttgaggtacactggctatgaggaatggtcaccgcatcagtcttaagagtcctcttactcacttttctttcttcctcagatgtgtaatcctcctgcctatctccagtctgggattataggcagaagccatcaaactccagccaagtctcatcccttttgaagctacttacaccctacttattccttatggtttttttttcctgattctgcccacggggtttcctccctcatatatatatgaggtacacacacacacacacacacacacacacacacacacacacacctcccagtggtctggtctgcggaatcccctccacgatgtaagttctgcctagagacagtggcatcaaatctacaggtacagtctcttctaatagcttaccaaccacaaacttgggttttttccaaaataaacgctgcaggggcaaagcagagtgacttctttctcaacaagctgctctcacagttgtccttgacacagtgggtcggcagcccctgtggactccatgagactcagttgctatgtctcccctgaattttgggtattttaaggttttcttcagtcttgcaagtggggataatgagaaaaagctcatttttgcatcc

SEQ ID NO: 2639 - DNA, 573 bp, Mus musculus
gacaatcctcctcgtcctcccggcccccgctcgccaatgctgtggcctgcacctgcatcgctctctgggaacctcggagacctcaactccttcgtactggtcttaccccttcgtactggtcggggtttactgcaggtccacctcccctaggccatggccaggtgggggaaggtcactccaggacgctagtgactctgcccagctctgctccgcctctctgcttatgcacctgccgccccctcgcactctctgccactgcggttgcagttccggcccgtccctcttctgcaggccagcccagcgggcagcctcggttcctgactcctggtctgtgcttgtgggcggcctgaaccacctcaatccggacaattgccaaacccaccctgggctgtagctgggaaccggttgtggctcctgccagtctagaccccggggaacaatttatgcacgtgacccagccacctaagactctcctggcccaggtctgtggctggtattcccattggcttactgttctgtctcactgggggcacccctaccctatactgtagaattcttggaatgacagagcac

SEQ ID NO: 2640 - DNA, 253 bp, Mus musculus
gacttttaaaatatttattgaatccacgacagaacaacaatcataaataaacaacatagaacgaccaagcttcccactcccatatcacccactaagtacattgttacatgagttaatccagggggaccaacaatttacacgttactttgtcaaaataattgactttcctttttgcttattgaacaatttcctagtaatatcttaagtatattaactgtaatcaaatttgtactatagttagaagccaactata

SEQ ID NO: 2641 - DNA, 682 bp, Mus musculus
attaaaatcactacttaaggcataaaaagcatagtagtacattgcttatatgccaagaaaaagaaagcaaagatattaaaattgaaggatttttctccatatatttttaatgaaaatttgctggatctgtcatattataacctgtcaagaaaggtataaaacaacaagcactcctgcctgcctattccactcatgcccagttcaaccccgatggatgttaattatgcatgcacttctttgtcattaccctctgtgcctcctgcagaagcagtccttgctgtgttggttttggcagctgtcttgacttaaaagcaccaatgtatttagatgcagagaccaagagcaaagtatttctagttaggaacttgggttttacacaaccagttccaaatcaagataagtgaagctgaagtgatttgggaaacagttgtctagtagaaaccatgtcctggaaagccagcacattttcccgaagcctcagtaaacttaatttgcttagcaggcattcaggtgactaagttgacaagagcagtggcatcccaattcatcactatggaaacactcatcagtggttggttggtttgtttgctgttattttttactgttgtaataatacagttagctaccccacgttcatgatctgcctttattatgttcaaaactaatgactgaaaaataatcc

SEQ ID NO: 2642 - DNA, 471 bp, Mus musculus
tgacctccaacaggaattccaccacttaaccctctagaagtcccactacttaatacttcaggacttctagcatcaggtgtttcaattacatgagctcatcatagccttatagaaggcaaacgaaaccacataaatcaagccctactaattaccattatactaggactttacttcaccatcctccaagcttcagaatacgtttgaaacatcattctccatttcagatggtatctatggttctacattcttcatggctactggattccatggactccatgtaattattggatcaacattccttattgtttgcctactacgacaactaagatttcacttcacatcaaaacatcacttcggatttgaagccgcagcatgatactgacattttgtagacgtagtctgacttttcctatacgtctccatttattgatgaggatcttaaaaaaaaaaaaaaaaaagggcggccgcctt

SEQ ID NO: 2643 - DNA, 20 bp, Artificial Sequence
  There is no sequence for this end of this clone.  This is a place holder.
  misc_feature (1)..(20): n is unknown
nnnnnnnnnnnnnnnnnnnn

SEQ ID NO: 2644 - DNA, 714 bp, Mus musculus
ctttttatctcctctgtatttatcttttaaagcagaatgtgattgggcactgttatttccattcacaagccttgctgagttacaagacctaggaaacttagggttgttctcgggactttggaaaacaagccacttggggaattcctgtcaggttgttttaacttgtgtttacttctaagactaatacatgcagaattaactacaggaaatgaaaattttaagatgtaatttaagccatcttaatttggtctcctaaggaatccagctcaacagctaaacacttcagaccagagcaaacatgaacagtaggttacgttacgtcttataacaaacgctctatcaacctcttgagttaaacctatagtatcacagtatcacatgtagaaattttatcttccccttagttttcatgccacacagatgttttaaatgttaacaaaaataaacaaaaatcatggaaaatatattatcagaaggaatgaaggtaagcaaacacatagttctggtgacttagtctacttcttccatgcgtgatgtgtcgtcatctccttccaggggaggcatttcttcagttacagcagcactggtgtcatccacagtaggatcatcctcatcaatacctagaccaagcttgatcatcctgtagatcctgttagcatgggtctggggatcttccagactgaagccagaagataggagtgcagtttcatacag

SEQ ID NO: 2645 - DNA, 573 bp, Mus musculus
gccgatttggacgagaaatcctgatgacatcactaatgaggaatatggagagttctacaagagcttaactaacgattgggaagaacacttggcagtaaagcatttttctgttgaaggacaattagaattccgggcccttctttttgtcccaagacgcgctccttttgatctgtttgaaaacagaaagaaaaagaacaacatcaagttgtatgttcgcagagtttttatcatggataactgtgaggaattaatccctgagtatctgaatttcattagaggggtagtggattctgaggatctccctctaaatatttcccgtgaaatgctgcaacaaagtaaaattctgaaagttatcagaaagaatttggtcaagaaatgcttagaactatttactgaactagcagaagataaagagaactacaaaaagttttatgagcagttctcaaaaaatataaagcttggaattcacgaggactctcagaatcggaagaagctttcagagctgttgcggtactacacatctgcttctggggacgagatggtttctctgaaggactactgtaccagaatgaa

SEQ ID NO: 2646 - DNA, 639 bp, Mus musculus
ctcattgtaagttgtttattgtaagataatttacagacatcctgctgtctttgtaactcagtggaccaagtttcttctgacaaagacagcaatcagttaaaatcagcctgcgcattcttcttctttacctcttgtctgaggatgcaacttgattttcattaatccagagcagcagccccagagatgatttcaatcaactcctttgtgatgacagcctggcgggtgcggttgaaagtcaaggtcaatttgtcaatcatatcagaagcgttcttgctggcgttgtccatggcggtcatcctggcactctgctcactggtggtggactccttcagggagtagtagatgaggttggccagattgtactcctggtaattctgcagcacatcagcatcaatgtcatcatagatgctcatggtctcagcagtcgcaatggtattcagagagaagatgggcttctcttctgtcttgtaggagataacagacttgaactgattaaaaatgatagagccttcatcaaattcatatccagaatttaacaactcaagggcaatgactgatgcatctccaaaagtaggaggcttccgtcccacatctttgaatgacaccaaaaactgatcagaatgagtcctataaagtatg

SEQ ID NO: 2647 - DNA, 532 bp, Mus musculus
gtctgcccgaccttcaaggctccaccatgttctcgcgggcgagcgttgtcgggctgtcggcctgcgccgtgcagccgcaatggatccaagttcgaaacatggcaactctgaaagacattaccaggagactgaagtccatcaaaaacatccagaaaattaccaagtctatgaagatggtggcagctgcaaagtatgcccgggctgagcgggagctgaagcctgcccgagtgtatgggacaggttctttggctctgtatgagaaggctgatattaaggcacctgaggacaagaagaagcacctcattattggtgtgtcctcagatagagggcttttgtggtgctattcactcctcagtggctaaacagatgaagaatgaagtggctgccctcacagcagctgggaaagaagttatgattgttggagttggtgaaaaaatcaagggcatactttataggactcattctgatcagtttttggtgtcattcaaagatgtgggacggaagcctcctacttttggagatgcatcagtca

SEQ ID NO: 2648 - DNA, 704 bp, Mus musculus
gtgttcaaactttattgttcacagtgaagataaggccccaggaaatgaagaactaagtcataaagttatacactgggacaccccatgggaggaggcctggctccgtggagtcctcctctctcagggtccggaagacattcagagcttggagaaggtgatgctttttgtgtccctcttctccatggctgcctggactgatttgatgatgtcctgggtctgcagcatgctcatgttccaggtggccatgtagtcaaggctctcgtccacagaatggtctcgggagtagatgagattgatttttgacccctgcacagccacagggctcttgctggaaatatcagccgccagggcaaaggccgcattcagcatggcgtccttatcttggaacacgcggctgaccagcccactgtccagggcctcgtcagccatcatcttgcgggcagagaaggtcagctcgttgaccaggctctggctcccgatgaccttgggcagtctctgcagtgttcctacatcagcagccaagcccatatctacctccttgatctggaaaaaagcatcctgagtgcagtagcgaatgtcacaggcagaaacgaggtccacacctccgccaatgcagcctccgtgaatggcagcaatcactggcttggggcacttctcaatgacagtgaaggtcttctggtacttgctgatgaggtcacggaggt

SEQ ID NO: 2649 - DNA, 555 bp, Mus musculus
tcttcgggagtaagtcgcacagctccggagctccagaaatggcttaccgcgatgacagtttccagtaaactccgcggcctgctgatgcagcagctgagaggtaccagccagctgtacttcaacatcagccttcgatctctgagctcctctgcacaagaggcctccaagagagcccccgaggaagtctcagaccacaactatgagtctattcaagtcacaagtgcccagaagcatgttctccacgtgcagctaaaccggccagagaagaggaatgccatgaacagggctttctggagggagttggtggaatgcttccaaaagatatccaaagactcggactgccgggctgttgtagtctccggtgcaggaaagatgttcacttcaggtattgacctcatggacatggcctccgaactcatgcagccctcaggagatgatgcggcccgcatagcctggtacctccgtgacctcatcagcaagtaccagaagaccttcactgtcattgagaagtgccccaagccagtgattgctgccattcacggaggctgcattggc

SEQ ID NO: 2650 - DNA, 677 bp, Mus musculus
ggtttttcgagacaggatttctctgcgtacgtctggctgtcctggaactcactctgtagaccaggatggcctcgaactcagaaatccgcctgcctctgcctcccgagtgctgggattaaaggcgtgcgccaccaccacccggccaaagtggcatttctaagaaataagacttgaggttgacctctggacaagcacacacacacacacacacacacacacacacacacacacaacgagaaggaaagcactaagccagcacatagcccacggcgctgtctgcagtctcgagatgtgcagttagaccctacagttcccattgttacagaacagagagaacccacaggaagcaaaccttgcacttttatgacgtgactcaatcactttactttcttctagcaaatagcatgagcacccacacttatgaagctctgccactctggtctactctagtgttcataattcctagcttataatttcagattactcaaactgctcatataaataacgtttattgaataattacaaataatctcccttcagcagcattttaagacgatatactactataaaaaagatttcaggcattagagttcacacacagactttttataatcactcatttcttatacgttccagacaagacttcttatattcatgagagatctaacagtcacacc

SEQ ID NO: 2651 - DNA, 564 bp, Mus musculus
cagtccaaaaggaaggttgctagataggcggtccagatctgggaaaggaagggggctgccaaagaaaggtggtgcaggcggcaagggtgtctggggcacacctggacaggtgtatgatgtggaagaggtggatgtgaaagatccaaactatgatgacgaccaggagaactgtgtttatgaaactgtagttttgcccctggatgagaccgcatttgagaagactctaacaccaattatacaggaatactttgagcatggagatacaaatgaagttgcggagatgttaagagacttaaaccttggggagatgaagagtggcgtgccggtgttggcagtgtccttagccttggaggggaaggccagccaccgggagatgacatccaagctgctttctgacctttgcgggacggtgatgagcacaaatgacgtggaaaagtcatttgacaggttgctgaaggatctccctgagctagccttggacactcctagggcaccgcagttggtgggccagtttattgctagagctgttggagatggaatcttatgtaatacctatatcgatag

SEQ ID NO: 2652 - DNA, 570 bp, Mus musculus
cagattttactgttctgaattttattctgaaactcaagtttaccccaaaccatcattgacatagtagcttcatcaagcacagtagaatgcaagtcctcaaagcagcagtgcaggcagggaggccctatgtacctcccagcttcggggaaacacaattgaccacacccaattagcaacaaatctatctcatgctattcgggaggtgtcagtctaagccctgacgacgagacgtggatctctacctatctacacatctcatcttgatgtcctgaggttgccaaagggactcctcacagcttagctttgcccggctgaagctgaaggttctgtagtttcatggccagtcccatgttaccagcaatcttcagtttcccttgaaagaaggccgactgagggttcatttttccagtcatcaaagccagcaagtctgagtcggccatggtgattgtgcagtcagccttcttatctgaattgggaagcacagatcctttgccattcttcacatccaccacccaggtagcttctttgcctccagggccatctttcactttgaaggcaaaaatgccaccg

SEQ ID NO: 2653 - DNA, 568 bp, Mus musculus
gctggcagctgagaggcgaagccggaaagaggcaggttcccggggcaaaggtggctctgcagcacaatctaggcctcggaggagctgtggttgtcaccctctacaggatgggttttcccgaagctgccagctccttcaggacgcaccaggtttcagctgctcccaccagctctgcaggggatggattcaaggcaaacctcgtctttaaggagattgagaagaagcttgaagaggaaggggaacagttcgtgaagaaaatcggtggcatttttgccttcaaagtgaaagatggccctggaggcaaagaagctacctgggtggtggatgtgaagaatggcaaaggatctgtgcttcccaattcagataagaaggctgactgcacaatcaccatggccgactcagacttgctggctttgatgactggaaaaatgaaccctcagtcggccttctttcaagggaaactgaagattgctggtaacatgggactggccatgaaactacagaaccttcagcttcagccgggcaaagctaagctgtgaggagtccctttggcaacctcaggacatca

SEQ ID NO: 2654 - DNA, 692 bp, Mus musculus
gagggcagtggttctctttattttagaaatgggggcggctgcacatacaaaaattgccacagagtgattcaaacttggaaaacttacagaaaaaaaaaaatgttccctgccccccaccccatagtcctcgccctctgaggtaaggctgtgccattttcccatggcctttacaaaacaaaacagaacccgaccgatccattcgtgatggcctcggccgtactgtgtggaccccaggttctggctcagtcagacttctccttctccttcatgtgcaagaagacgatgctgaagatgaagagcccggccatcatggagaaggcactgtcatagtagggataggccgaggggatgaagcgctcatactgcgtgtgctggagtggcctcactgacacctgggtggaagagtacaggtgggtgtagcctagccggttgtaatccactttaaactggaatacaccatacacgtcaggcagcttgaactggacactgtacttgccacctttcctcttcaggaaggtcctcacgaaggggtcgatgcgcacgaactccagctgaatgtcatcaccatcaaaggggacccacttgccattggagagctgttctatgatgatgctatactccaccaagtcggtgacagtgtaggcattgggtggagcatctcgcccacccggtgatgggaacaggccctactc

SEQ ID NO: 2655 - DNA, 574 bp, Mus musculus
cctgaacgtgcgggacacgcactcgctgttcttccgcagcctgaaggaccggggctttgagctcaccttcaagaccgcagatgaccccagcttgtccctcattaagtacggggagttcctctatgacaaccttatcatcttttccccgtcggtggaagattttggaggcaacatcaacgtggagaccatcagtgccttcattgatggtggcggcagcgttttggtggctgccagctctgatattggtgaccctcttcgggagctgggcagtgagtgtgggattgaatttgatgaagagaaaacagctgtcatcgaccaccacaactatgatgtttctgaccttggccagcacacactcattgtggctgacactgagaacctgctgaaggccccgaccattgttggcaagtcatctctgaaccccattctcttccgaggagttggaacggtggcagacccggacaatcccttggttttggacatcctaacaggctcttcaacctcttactccttcttcccagataaaccaatcacccagtacccccatgcggtggggaggaacactctgctgatt

SEQ ID NO: 2656 - DNA, 725 bp, Mus musculus
caaagggcgatgatgatatcaaacactttttatatgctaattttgaaataagtaacaataattgggagaacacaactcagtaaaggcaaatgaagattctacaaacattttatatagaaatattttatgaagctttgacaacatagtagatcattatgtcatactgtaataaaggtgaaggaaaagattaaactgaacgacaaagaaagtgctcacagcaatgcatggcagtcagtctccatgaaagtgcatcaaaagttaaggcaatgtcccatgttggtactgcatgttacaaaaagacttgcagaacagttttaaaaaaatatttacaaacagttttttctttattcttctcagggatattgaaaggggaacttttgtgactattcttgctctagaaaaacacagagatgacaaacacatcggcccaagtcagtgaaggtaaaatgttctatacagactcactgatttgcagtcctttcttagtgtgggccgcttttctgcttgtaaggtgccaggtcagttctctcatttaccaaaatagttagtgatggctgatgacagtgactctggttacatgaggtcctcacccttagcttccagtttctacaatcacactaataacaagctttaagtccttctgtaccacactagaaacctacaacttttcttctttctgcagattttgagagtcattttatgaagagccaccatacacacattac

SEQ ID NO: 2657 - DNA, 571 bp, Mus musculus
gcttgctggtattgatttcagtctcctttgtggcaatgggacatcttatgtatttccgatttgcccagaagactctgggcaaccagattttgtttgtggtcctgatgaaaaagaagttacagatgaaaatcaaccgaatacatctgttgtataaaaatagtttagctgtggcccctgttactagattgtggagagcatgtgtgcttattttgtactgcagaatcccaataaatgcctgcatttctctctggttttaccacatctgtgccttaagggctaggagcactaactaaccatcgccagcaaagatggttatttctccttacatgtaaacattggaaaataggaagagggagaggcagtcagcgtgtgtataggaagggtttaatggtaaaatgaacttcccttactcttatgagtatattaaattttaaagagtggttgtcaggtgagtaaaattattccttagcagatatttattatctactggaatgataaatcaattcaccctaaaactcactcttgtaaaactctgctccacttcctttttttaagatcagtgatatttttc

SEQ ID NO: 2658 - DNA, 426 bp, Mus musculus
gttctttagtgtctttttcctttattcattttacaaaaatgtgcaaatataaatttaataaaataaagtaaaagatgagcagatttggaaggaaggaacgaatctatacttttcatgcaaaattttacgtatcaggtttcccctaaaaataacctatggaaattatctagccttatgatattgtataaaatatctaactgaaaagttttacacatttaaaaatcctgggatcttggaattttcttttcttctcagctacagcaatacttgactgggaactgcatgagagttgcctgtgctaattcccgggaaaaaggtagaaatagcgtgtcatggatactctctcaatagtgggcatctgggtcagttcacctgggacctcaaatgagtgttgaacctttcgaaaaatttccgccaaatgataac

SEQ ID NO: 2659 - DNA, 473 bp, Mus musculus
tgctttttatgtccaggagtcctgcacagccatggcggccaggaggacacatgaaagagatccaatctacaagatcaaaggtttggccaaggacatgctggatggggtttttgatgacctggtggagaagaatgttttaaatggagatgagttactcaaaataggggaaagtgcgagtttcatcctgaacaaggctgagaatctggttgagaacttcttagagaaaacagacatggcaggaaaaatatttgctggccacattgccaattcccaggaacagctgagtttacaattttctaatgatgaggatgatggacctcagaagatatgtacaccttcttctccatcagaatccaagagaaaagtagaggatgatgaaatggaggtaaatgctggattggcccatgaatcacatctaatgctgacagctcctcatggactccagagctcagaagtccaagatacactgaagc

SEQ ID NO: 2660 - DNA, 700 bp, Mus musculus
ccttcaggggtgtttatttcccagtcagaagagaagcagggacaggctcctctgcctgttgaggctgggcctggcagacaccacacagggactggggatagggaggggaggcacaggagacagctcccaactgtgtgaacttggtcccacatttgtcctggctgggtccagggagggtcggcccagggatggtggcaccaagaaccagggcagaggcatcaggccagctggcccaaatggaggcaataaatactgacaggccaggcacgaggttcaggccacgtggcccaggtgagacaagtaaggctcggctggctttgtccctcaggggctctctgtggggacaggggctccgagtactgcctacaagggacagagaaggcagaggaatgaggcaccctaccctgcctcctagatggggctggaggcatcgagttttggcaattgaccctcccctagctactggagccacccccaaccctggccacggggaggggaagagctggccaggctcgcaggaagcaacagcagcgcaccccaggcctcccttgggtgggtcactgggatggggatggcagacgaggcgaggacagggagagcacatgctcatgcagacagggagttaagagttagcgacggcccccagcacacgttccacatgttaaggcatcatggttagacagtgactgacagtgatgga

SEQ ID NO: 2661 - DNA, 562 bp, Mus musculus
accgtccgagcggcgggcggcggacgacgttcgtcatttggtgcgggagggagcgcgagagcggcggtcgagcctccggtgtcccaagctagaggtaagcatggcagaacaggaacccactgctgagcagcttgcgcagatagctgcagagaatgaggaagatgagcactctgtgaaccacaagcctccagcccagaagagcatccaggagatccaggaactggacaaggacgatgaaagcctccgaaagtactaggaggccctgctgggccgagtagctgtctctgcagaccccaacgtccccaatgtcattgtgactcgactgaccttggtatgcagcactgccccaggccctctggaactggacctgacaggtgatctggagagcttcaagaaacagtcgtttgtcttgaaggaaggtgtggagtaccggataaaaatctctttccgggtgaacagagagatcgtgtccggcatgaagtacatccaacacacatacaggaaaggggtcaaaattgacaagactgactacatggtcgggagctatgggccgagggccgag

SEQ ID NO: 2662 - DNA, 543 bp, Mus musculus
  misc_feature (1)..(543): n is g, c, a or t
ggcttttcgagacagggtttctctgtgtagcactggctgtcctggaactcactgtagaccaggatggcctagaactcagaaatccgcctgcctctgcctcccaagtgctgggattaaagtcgngcgccaccacgcccggctcttacttggcttttaagtttgtcactgttgtgccaaaacccacaccccgtgggaatatatgttagtaagggcatctgaaacctgaattggctccatttgtttctgtgtttatactggaaaccacctacatacctacatacatacgtacgtacatacgcgtgcacacacacacacacacacacacacacacacacacacacacacacgggatatggtcaaacgggtcaaggtgagtaactttctccttaactggagtttaattaataaactatttagggatccaccaccaggcatatagacatattaaaacaaaacaagaccaagtgctggcctcagcagcttcaggaagatgactgagccttgttgtaaaaggcagcagtttagtttgcctaggaatgcaaa

SEQ ID NO: 2663 - DNA, 578 bp, Mus musculus
attctgatgatgtccccatggtgctggtaggcaacaagtgtgacttgccaacaaggacagttgacacaaagcaagcccacgaactggccaagagttacggaattccattcattgagacctcagccaagacccgacagggtgtggaggatgccttttacacactggtaagggagatacgccagtaccgaatgaaaaagctcaacagcagtgacgatggcactcaaggttgtatggggctgccctgtgtgctgatgtagtaagacactttgaaagttctgtcatcagaaaagagccactttgaagctgcactgatgccctggttctgacatccctggaggagacctgttcctgctgctctctgcatctcagagaagctcctgcttcctgcttccccgactcagttactgagcacagccatctaacctgagacctcttcagaataactacctcctcactcggctgtctgaccagagaaatagacctgtctctcccggtcgttctctgccctgggttcccctagaaacagacacagcctccagctggctttgtcctctgaaaagcagtttacattgatgcag

SEQ ID NO: 2664 - DNA, 560 bp, Mus musculus
  misc_feature (1)..(560): n is g, c, a or t
cattcagaagtttttaataaacaacttcattataaaaacttttttttgaaaattaattctgtaaaacattgaaaaaatctactttaacaaagatatgccctgggcattttctaatggctcntatattttacaattaaaaaccttgttttatataaagccaaaaatactccaagaggttattcactgtgtttacaaagtgctagaaggtttttgtcttgtatttttctttaaataatctggcattaagaaagagtggctctagagcatcaaccaactggcagtggggaggtgtgaagtagtgttcagggattctagtgccggacatgcagaggtgcgcatggagaactggtggaggacgccaaagtaacatctgaagcagggtgataagaacaactccacacaggccaagattacacagtgaacaccctctccacaccacagactccgctctccagtggttaaagtcacagtcacttgcttccacagcaggttcagagctccaggagaggccagggtgaggtcacagagaaatctggacttttctggccaacacctaccta

SEQ ID NO: 2665 - DNA, 598 bp, Mus musculus
tctgattcagaaacacacttctacctctttactgttaactccaacagatgtagccagcagcctgggcacttgtgttagtggtgccgtttgctggcttctccactagggtttcaggacagactacctaggaactgcctcaacctcccaccagttcttccctgcccctcccttctgtctagattcacttcagtttattgttgggaactgtgcaggtccaagacctggactcctgcttcagcccaggccagtactccttgtctgaggtgaaagccttcagtttagctccctggcccttgtgtggaagcaatgtggagtgaatgagcatattttgatttaagcaaggtagcttggaataccttttttaaaaacaactggatataaatatgtctgacaggattggaatcagactatgtgatttgcttgtaaagattagtttcagtgagtcccagggactaattaaggtttatttttaaaagcgtctgccttggtgcgcaaccacctcctgcatgctatgcatgctgttgggactcgtattacagggaatggcattgagaagccaagtgggactcactgctgccattctccttgtgcttggtct

SEQ ID NO: 2666 - DNA, 615 bp, Mus musculus
  misc_feature (1)..(615): n is g, c, a or t
ctgcttctaatatttattctctaaagctgccatcttagctcataaggctaccttggacagatacagaaaagtaccttctaaacagtaaaatacccatatcagattttattattaccaaagatttttttaaanaggnnctctcaaagacagggaggnctttgngtaactttaattcatgtagctcagtctctagtctactcggtttcttcgagctcgttgctatagacaccatgtgtttagtggggcctgggagccgggctctcatcgttcctctgcatgctgtgtggccatcctgcctgatgggaagacttcccatcggctcacaggaaaaagaaacaggagtcaagaaaaaaaaaaaataacaacaagatgtatttaaaaacagacttctccagttggcattttgaaatagctaacaattgtctctaaccctcatctggtttcctttgctcgggcatcctctgagacgttactccttgaacctcgggcagcaccagacgttaagtccccagagggggaggtattaggtaaccttctgctggccattgttgtctgaatgcaatagacagagcctgaaacctctagttcttgtcaggacggtcatcagggaaaaaa

SEQ ID NO: 2667 - DNA, 667 bp, Mus musculus
ctgtacctcatcgggactgtgatcgccgggcgagatttctataagatcttgggggtgcctcgaagtgcctccataaaggacattaaaaaggcctacaggaaactggccctgcagctccaccctgaccggaaccctgatgacccccaagcccaggagaaattccaggatctaggtgctgcttatgaggttctgtcagatagtgaaaaacgaaaacagtacgatacttacggtgaagaaggcttgaaagatggccatcagagctctcatggggacattttttcacacttctttggagactttggcttcatgtttggaggaacccctcgtcagcaggacaggaatattccaagaggaagtgatatcatcgtagatctagaagtcactctggaagaagtgtacgcaggaaattttgtggaagtagttagaaacaagcctgtggccaggcaggctcctggcaaacggaaatgcaactgtcggcaagagatgagaaccacacagctgggaccgggacgcttccaaatgacccaggaagtggtttgtgacgagtgccctaatgtcaaattagtgaatgaagaacgaacactagaagtggaaatagagcctggggtgcgagatggcatggagtacccctttattggagaaggtgagccgcatgtggatggggaac

SEQ ID NO: 2668 - DNA, 292 bp, Mus musculus
  misc_feature (1)..(292): n is g, c, a or t
cnnnnnnnnncnnnnnngggagggagaacccggcaaaganaggcacccccagaggacangaaagacaaaaaccacaaagaanagaaggaacaggaacagggcgccaacacaggcagcacccaagaaaaaacaaaaaatttttttttcactggnattctcccaggaaccaccatagggaaaagctatacaacagaaaagaaggaagcattaaaccaaaaactatttgcttttaaccctaaagactgagggtctcactccactggcccatgggaagcgcacaaaggctgaacag

SEQ ID NO: 2669 - DNA, 620 bp, Mus musculus
tggaaggcagtgacttaaattactatttcaattggataaaaactcagctgagttcacagaaacttcgtggcagcggtgttgctgttgaaacaggaacaatctcttcaagtgatagttctcagtatgtgcagtgtgttgctggctgtctgcagctgatgctccgggtcaatgagtaccggtttgcctgggtagaagcagatggagtgaactgtataatgggcgttttgagtaacaagtgtggttttcaacttcaataccaaatgattttttcaatatggctcctggcattcagtcctcaaatgtgtgagcaccttcgtcgctataatatcattcctgttctatcagacatccttcaagaatctgtcaaagagaaagtaacaagaatcattcttgcagcattccggaatttcttagaaaaatcaacggaaagagaaactcgccaagagtatgctctggctatgattcaatgcaaagtactgaaacagttggagaatttggagcagcagaagtatgatgatgaagatatcagtgaagacatcaaatttcttttggaaaaacttggtgagagtgtccaggaccttagctcatttgatgaatacagttcagaacttaaatctgga

SEQ ID NO: 2670 - DNA, 76 bp, Mus musculus
gaagaagaaaagaaggctttacggagagggcggtctccagctgacagcacatggcagcgggggtcactaaggcccg

SEQ ID NO: 2671 - DNA, 592 bp, Mus musculus
gcgattgtctggcggcctggggcggccccgtggcgcctaccctctgcctgtggggacggaggagcgcgccatggcggtgtccgagagtcagctgaagaagatgatgtccaagtacaaatatagagatctaaccgtccgtcaaactgtcaatgtcatcgctatgtacaaagatctcaaacctgtattggattcatatgtttttaatgatggcagttccagggagctggtgaacctcactggtacaatcccagtgcgttatcgaggtaatatatataatattccaatatgcctgtggctgctggacacatacccatataacccccctatctgttttgttaagcctactagttcaatgactattaaaacaggaaagcatgtggatgcaaatgggaaaatctacctaccttatctacatgactggaaacatccacggtcagagttgctggagcttattcaaatcatgattgtgatatttggagaggagcctccagtgttctcccggcctactgtttctgcatcctacccaccatacacagcaacagggccaccaaatacctcctacatgccaggcatgccaagtggaatctctgca

SEQ ID NO: 2672 - DNA, 403 bp, Mus musculus
gtgtttcagactttattgtagacgagacagacctggggaggctactccaccaggaacaggctggcactcaagtattgaccttcggggtaactctagggagggctagcactaagatagtgttgaccatcggggtaattctaggaagcgtgagttcaggacagacctcagttcgcagaaacgggctgtgaggttgggtcagggagccaatgaagaaggggccatgtgaaagaaactggggagaatgaaggctgtgtggacttgactgggaagagggtgaggagatggggctgaccaagctgcagaagggagcgggaaggagagagaaccaggagccacagtgcagaaggccagggtgctgtccccacccagggcctgcaggatccccagtgtggacaggtcctcc

SEQ ID NO: 2673 - DNA, 554 bp, Mus musculus
ccagtttgagaagaccacagcaccagcaccatgcctatgatactgggatactggaacgtccgcggactgacacacccgatccgcatgctcctggaatacacagactcaagctatgatgagaagagatacaccatggttgacgctcccgactttgacagaagccagtggctgaatgagaagttcaagctgggcctggactttcccaatctgccttacttgatcgatggatcacacaagatcacccagagcaatgccatcctgcgctaccttgcccgaaagcaccacctggatggagagacagaggaggagaggatccgtgcagacattgtggagaaccaggtcatggacacccgcatgcagctcatcatgctctgttacaaccctgactttgagaagcagaagccagagttcttgaagaccatccctgagaaaatgaagctctactctgagttcctgggcaagaggccatggtttgcaggggacaaggtcacctatgtggatttccttgcttatgacattcttgaccagtaccgtatgtttgagcccaagtgcct

SEQ ID NO: 2674 - DNA, 406 bp, Mus musculus
acttttccagtgagtttttattagtagttgcatcatgattcagggtcccagggtaaggaccatcatatgctgaggtcccccttttctatccggggagaaagacaaagaacagaggagaggtgggcggagccaggtcagatcttcccaggaaatgtgccttcagctatgcggtcatcccaggctgagacccatgacacgggacagagggacttgtacacacgccggtaccactcacacacggagacatcaccccccttggccgtcattgccttctcacagcggtggaagtccaggtagttctgccaacagttcttagtctggttctggttggggaagcggctgtcaaagggggcagttttgtagttcttgattttagtcttgatgtcttcagccatcctgactccta

SEQ ID NO: 2675 - DNA, 503 bp, Mus musculus
  misc_feature (1)..(503): n is g, c, a or t
ccgcttcccgtctgacattggcgtctttgctaagggtcacattgaagtgacgctactccgggacaatctttaggagtcaggatggnctgaagacatcaagactaaaatcaagaactacaaaactgccccctttgacagccgcttccccaaccagaaccagactaagaactgttggcagaactacctggacttccaccgctgtgagaaggcaatgacggccaaggggggtgatgtctccgtgtgtgagtggtaccggcgtgtgtacaagtccctctgtcccgtgtcatgggtctcagcctgggatgaccgcatagctgaaggcacatttcctgggaagaactgaacttggttccgccaacctctcctctgttctttgtctttctccccggatagaaaagggggacctcagcatatgatggtccttaccctgggaccctgaatcatgatgcaactactaataaaaactcactggaaaagtaaaaaaaaaaaaaagggcggccgca

SEQ ID NO: 2676 - DNA, 583 bp, Mus musculus
gagaaaatgagaattttaattcttgaagtaacagcaatttatccattgtatacactactatattaagcaaatcaaccttttggaaaatttagacacagaagggaactgtctagttcagttttcccttcagagagatgaaaagctttttggctcttaagtctgtgataaaaggcgtacataattcttgtgtctactgtacagaatactgccgctagctggacttccaaacttgagtctctaacactctgtaatccagacagggttcaaccctccaccttgcacgcctgcgttagaggacttaaacacacaatccaggaattccttacactaatttatacattttaattggttgcatatattaacatgtactataagattcttttctaagaagcattacataataaatggatactgtaaaaagatctgattagttaaaagtaacaagcattaacagatacatacaaaacagcctgctcagaacggagcctgggcaccagccttcccacaggaccttcaagggagggaggggtaaaagaccacaagaccgttaaaaaaaaaatcagataattagacacagatgaac

SEQ ID NO: 2677 - DNA, 554 bp, Mus musculus
gcggcggtgtttggggccgggcagctccgaggagcctgctggagccggaatcggacgtctctgttgcggcctgcgttgtgtctcctcctccgttgaccctgcgcttcaaggatgacctctaggaagaaagtgttgctgaaggtcatcatcctgggggactctggtgttggaaagacctctctcatgaaccagtatgtgaacaagaagttcagtaaccagtacaaagccacaataggagcggactttctgaccaaggaggtgatggtggacgacagacttgttaccatgcagatctgggacacagccggtcaagaacggttccagtctcttggtgtggccttctacagaggtgcagattgctgtgttctggtgtttgatgtgactgcccccaacactttcaaaaccctcgacagctggagagacgagtttctcatccaggccagcccccgggatcccgagaacttcccttttgttgtgttgggaaacaagattgacctggaaaacagacaagtggccacaaagagggcacaggcttggtgctacagcaaaaacaa

SEQ ID NO: 2678 - DNA, 565 bp, Mus musculus
atgtagggaagttcatattttatttgtccagtgacattttttacagttgaatacaagttaaaggcctgcttgcacaccaaagccaggtcctttgggtggttcagtcaaagaagtaaggcctccagctggctcacaacagaagcggccactccttggccctggtttgggaacttttccagctttgagttcatcaataatctcttcaatatccttgggtgtcagatcctcatagtagttgtcatttatttgaaccatcggtgcatttacacaggcccctaaacattccgcttctataagagtgaaaagtttgtcaggtgtagtctctccaacctttattccaagctttctctgaagggtctccaatatgctgtcagaatctcgcagcatgcaaggtgtagtagtgcagacctggatatggtacttcccaactggctttcgattatacattgtataaaaagttgctacttcatatactctcattggaggtacttgtaaaacttcagccaccttgttcatagcggagataggtagccatccattctgcctttgggcgagatccaggact

SEQ ID NO: 2679 - DNA, 598 bp, Mus musculus
gcgctgcgggccagggcgaccggcctcgctgctcagtggggaagacatgcaaggaatttgcataagacagcagtgcacaatggtgctggaggagccttatttgtgcatagagatactcctgagaataacccatatactccatttgatttcacaccagaaaactataagaggatagaggcaatagtaaaaaactacccagaagggcatcaagccgctgctgtgcttccagtcctggatctcgcccaaaggcagaatggatggctacctatctccgctatgaacaaggtggctgaagttttacaagtacctccaatgagagtatatgaagtagcaactttttatacaatgtataatcgaaagccagttgggaagtaccatatccaggtctgcactactacaccttgcatgctgcgagattctgacagcatattggagacccttcagagaaagcttggaataaaggttggagagactacacctgacaaacttttcactcttatagaagcggaatgtttaggggcctgtgtaaatgcaccgatggttcaaataaatgacaactactatgaggatctgacacccaaggatattgaagagatta

SEQ ID NO: 2680 - DNA, 239 bp, Mus musculus
agatatagccaaagaccttttatttgggtaaagtactaatcaccaggtggaacagatacaatgttagcatactactcccgaggtcctgatggccctcttctgaagtaggcaatgctaaattcagtgaccagactcccagagttcctgactgtgcaagcagcttcatgttctgcttagcttacttaagatttccaacaaggctggccaagggtcacatgaattcacagatgagaaattac

SEQ ID NO: 2681 - DNA, 520 bp, Mus musculus
gaagaacaatggccagaacctggacgaggacttgggtcattgtgagccaaagacagatccaccctctgcagacaagaccctcctggaagagaaggcaaagctggaagagcagctgagagagaccatggattactcaaacgtgctttggcagatactgagaatctacggcagagaagccagaagctggtagaggaggccaagttatatggcatccagggtttctgcaaggacttgctggaggttgcagacatcctggagaaggcaacccagagtgttccaaaggaggagatcagcaacaacaaccctcacctgaagagtctttaagaaaggcccgggaggacggaagtccagattcagaaggtgttcacaaaacacggcttgctcaggcttgacccaattggggccaagttcgacccttacgaacatgaggccttgttccacacccctgtggaggggaaagaaccaggcactgtggcactagttagtaaggtgggctacaagctgcacggacgcaccctga

SEQ ID NO: 2682 - DNA, 375 bp, Mus musculus
ctggaacacaaaagtttattagagtaaaaatacatatataatatccaacattaaaattatctcatgtcacatgttttacctgcattagtttttccaaaaaaaatgctttaaaactctatgccttaaataattttgcatatatgtaaacaaatcttagattaccgaagatgccattatacctgttagatattgaacatcaacctttaggaatgggaactacaagtttcactctattacactaagcgctactctgaaggaaggagggaaggacagaaggaaggacagaaggaaggataacccacttgagatgaggtaagagtaagagtttagtaccaaatgttgacacaagaatgttaaaggcattcatggaaagtc

SEQ ID NO: 2683 - DNA, 570 bp, Mus musculus
ccttgtgcacgcggagcagcagagacggggcgatgctacgggtgcggtgtctgcgcggaggcagccgaggtgccgaggcggtgcactacatcggctctcggcttggaggatccttgacaggatgggtgcagcgaactttccagagcacccaggcagctacagcttcctcccgaaattcctgtgcagctgaagacaaggccacccatcctctgcccaaggactgccctgtctcctcttacaacgaatgggaccctttagaggaagtgatagtgggcagagctgaaaatgcctgtgtgccaccattcacagtggaggtgaaggccaatacatatgaaaagtactggccattttaccaaaaaaatggaggtctttattttcccaaagatcatctgaagaaggctgttgctgaggtcgaagagatgtgcaatattttatcaatggaaggagtgaccgtgaggcggcctgaccccatcgactggtcactcaagtataagactcctgattttgagtctacaggtttgtacagcgcaatgcctcgagacatcctgatggttgtgggaaacgagatta

SEQ ID NO: 2684 - DNA, 576 bp, Mus musculus
tggcatttgtgtggtctcgtcgtcagcgcagctgggcctacacacaagcaaccatgcctaagggacctgcagttggcattgatctcggcaccacctactcctgtgtgggtgtcttccagcatggaaaggtggaaattattgccaatgaccagggtaaccgcaccacgccaagctatgttgctttcacggacacagagagattaattggggatgcggccaagaatcaggttgcaatgaaccccaccaacacagtttttgatgccaaacgtctgatcgggcgtaggtttgatgatgctgttgttcagtctgatatgaagcactggcccttcatggtggtgaatgatgcaggcaggcccaaggtccaagtggaatacaaaggggagacaaaaagtttctacccagaggaagtgtcctccatggttctgacaaagatgaaggaaattgcagaagcgtacctcggaaagaccgttaccaacgctgtggtcacagtgcccgcttacctcaatgactcacagcgacaggcaacaaaagatgctggaactattgctggcctcaatgtacttcgaatcatcaatg

SEQ ID NO: 2685 - DNA, 552 bp, Mus musculus
  misc_feature (1)..(552): n is g, c, a or t
ggtgccaatttaaatagttttattattccatgttacttgttttgggtccctgtggaacaaagctacaccttcttggactgacttaatccacctcttcaatggtggggcctgaagaagcaccaccagatgggggcgctcctccacctgggaagccaccaggcattcccccaggcatgccacctgcactctggtacagcttggtaatgatagggttgcagactttctccagttctttctgctgatgctcaaattcttccttctctgcagtctggttcttatccagccagctgatgatttcattgcacttgtcaagaatcttctgtttgtcctcatcattgatctcgccttgaagtttctcatcttccacagttgctttcatgttgaaggcataggactccagtgagttcttggaggaaaccttatctctctgcttctcatcctcagccttgtacttctcagcttcttggaccatgcgctcaatatcttccttactcaagcggcccttgtcattggtgatggngatcttgttctcctttcctgtgctcttatcta

SEQ ID NO: 2686 - DNA, 571 bp, Mus musculus
attttattttatttatttttattatttttttttgtagaaaattacttgaagtatgcacaaaggagaaattcagagcttgagagacaagtgagccccatgaggcagtctcagaagctgctgatggtccttcctgggatctagcagggtccccaggtcctttaactctacccggaatgatcagtttatcacctaactccagacagctgatttctttaaagaaccaagctgaccagttccagggcctctggcattgcttcttgaggaaagcctgtcttccaggtgctttgcatctttagggttcctctgccctcaccactccccccacccccagttcctggcacttgaactcattaccggtttctgtgaagggacatgtcttcgcttcagcggtgtgtccatggacacacgcagatcaccagggtgggacaaattttaaacccagggtgcctgggttcaaatcctagctcaagctctttctggtaaggtggcatcggacttggaaaggtccacgagattccctatgcgtcaatgtccttgtcttgtagcacagcagaatagtactgacctcaga

SEQ ID NO: 2687 - DNA, 583 bp, Mus musculus
gcgctggagcctcccgggtcaatgtgaagtgacttctgctcctgatcccaagcctgtgctggcacctctgggtgaacagggtcagatccccgctcgtgacgttaatgaagccctggtcctttaggggctctgtggagttacaccccaggccacccccttccgagttctgacagattcgctggagcttcagagagtggacctacagacagaaggattatttgggtctggcggctcaggggaggaggagggctcgggactggggcctcaggtaggggctggcctgggcgctcaaggaacgagcctgctggaatcgctctgccttccctaccaagggactgaggacacaggcccatctgtatctctgtcatggccctggggaccctctttttggcattggctgcaggcctgagcactgccagcccacctaacatcctgctgatctttgcggatgacctgggctatggggacctcggctcctatgggcaccccagttctaccacccctaacctggatcagttggctgaaggtggactacggttcacagatttctatgtgcctgtgtctctgtgcacgccatctcggg

SEQ ID NO: 2688 - DNA, 495 bp, Mus musculus
ccaaaggtgatgggtttattttactctgatgcaaaaccaaagctctcactagagcagagactgatataacaaaaggccatggaaaagtggactgggacatgcaggacacggtgtacagaccggggaggcaggtcgctcctttaacatgacactacgttgttgctgaggaacatatttaaattaactctgcagaactcaattgaaatgtggcacaaacatgacaatttccgggcatgccttccaggacctcccattggatagatctgtaatctctagacttcagtgtgggaagaattacaattctttggaagaataaaaagttcacacttttgaaatttcacagaattttaaggccaaaacatagggggttcatttctcttcatttccagggacaagtgatactctactcaaaaccacactaagcctccagttcaaatcccaatccaaccttggggcctcctgcattgaagttctttccatctattaaagctgaca

SEQ ID NO: 2689 - DNA, 596 bp, Mus musculus
ggacgggcccaccctcgggttgtagctatgtgtaacacaccaacttattgcgacctaggaaaggctgccaaggatgtctttaacaaagggtatgggtttggcatggtcaagatagatctgaaaaccaagtcttgtagtggagtggaattttctacttcaggtcatgcttatactgatacagggaaagcatcaggcaacctagagaccaaatataaggtctgcaactatgggctcaccttcacccaaaagtggaatacagacaatactcttgggacagaaatctcttggagaataagttggctgaagggttgaaactgactcttgataccatatttgtaccaaacacaggaaagaagagtgggaaattaaaggcctcctatagacgggattgttttagtctcggcagtaatgttgatatagatttttctggaccgaccatctatggctgggctgtgttggcctttgaaggttggcttgctggctatcagatgagttttgacacagccaaatccaaactgtctcagaataatttcgctcttggttacaaggctgcagacttccagctgcatactcacgtgaatgatggcactgagttt

SEQ ID NO: 2690 - DNA, 594 bp, Mus musculus
gagacagtacacatttactgcatccctccctcaaaggtacaaatggctttgcaaccagggtgtcccatgctcacttcagcactgttcagggtacctgacggggcagtcccaccctttgttccaacatcaattatgttttctaaagtaaagtgctgtgacacacccctccactgctgagtgtcccgcgcagacggcttctgtagcgtccctctctggacaccactgtggcactctctgggttgtgccgcctgcagccaggcctcagttcccagggtattcaaagaccgcagcagctcccatcccagtcccgatgcacatggacaccacgccgtaagcccgtctgccacgacgcttcagttcattgagtagcgtgacaacctgccttgctcccgtgcagcccagggggtggcccagggctattgcaccccccagcgggttcaccttctctgcaggaattcctagcttctccacacagtagacggcctgacttgcaaaggcctcattgatctcaaagatgtctatgtcattcacagtcagccctgctttctgcaaggctgcagggatggcataggcaggtccgatgcccatgacgtc

SEQ ID NO: 2691 - DNA, 466 bp, Mus musculus
ggcacgcatcgaccaatttctgagcggcatcccagagactgtgcctttgactacggtcaacagacagtgttcatcgggactgcaggcagtggccaacattgctggtggcatcagaaatgggtcttatgacattggcatggcctgtggggtggagaccatgtacctgtctgggatggggaaccctgggaatatctcttcccgcctgctggagagtgagaaagccagagactgcctgactcctatggggatgacctcggagaatgtggctgagcggattggcatttaacggaagaagcaggatgactttgcgctggcctcccagcagaaggcagcaagcgcccagagcagaggatgcttacgtgctgggattgtgcctgtgacaaccactgtcctggatgacaagggtgacaagaaaaccatcaccgtgtctcaggatgagggtgtacgtaccagcaccaccatgcag

SEQ ID NO: 2692 - DNA, 585 bp, Mus musculus
ccaccttaatattttgtttttatttttgaattgactgccatcatgccaagtccccaaggtctatttctccaacttgagatgtatggaggcttttagtctctctgggattgagttgttttgtcacggcaaccagggcttgcctgttcttagactcgagaccagtttagtaataaatatattcaccttaccaacaagaaaggaagactggctggcctgaccctttagcccttccaaaagggaccagaaaggggtgtgagtgtgaccctggcaaggactacaagcatgagataggagtcttaggaaatctctctacacgccagcccacatgacttaaacatatacaagggtaaggcatcgtcatctacgtacctaaacgtcaaaccaatccctaccttttccctcttcccaaaatataagatacaaggtgctgcactaattccagcagttagatgaaaacacaggtaagaagattttggattcaatcatcagagtaccaatttaaatgatttttgtaaacattttgataaaggccacgacacgtgtcctattgttcaaatgcctagtggcaggactcccgatgagacc

SEQ ID NO: 2693 - DNA, 578 bp, Mus musculus
tctggaacatggcggcgcgttcgctgtgggcggtgcagcggctgcagcgcctcctggcctcgggggctatgtcagagagcaggggatggctccacccattcagcactgccacccaaagaactgctggggaagactgcagttccgaggaccctcctgatggactgggaccctcccttgctgagcaggccttaaggctcaaagctgttaaactggaaaaggaagtccaggatttaaccctgagataccagagagctgtcgctgattgtgaaaacataaggagaagaacccagagatgtgtggaagacgcgaagatatttgggatccagagcttctgcaaggacctggtggaggtggcagacattttggagaagactgccaagtgctgttcagaaggggcagaacctgaggaccacaggcgcactctggaaaaagtcttccaagggctgtccctgctagaagccagactgaaaagcgtatttaccaagcatggcctagagaaaatgacacccatcggtgacaaatacgaccctcacgagcatgaactcatctgtcacatgccagcaggtgttggggtacag

SEQ ID NO: 2694 - DNA, 441 bp, Mus musculus
cctttaaaatttttaatggacaggaaatgtatagaataactgccaagtcacgtaaattaacttttttgttaatgtctgtgatccaggaaagaacacgagatcggcgcgggtgttttcgtcgtctgttgtctgggcgcatgaccgaggtgaccaagtgtggaccgtcaacccatctctacacggtccagaaaaaaaagcgggtgccgtgcttggcgggtttcagatccccttcaatcacagggttgggctctggccttgctcttgagagataaggattctctggcaaaggacgatccgttttcattttggtgaccttagacaactgccccaggtccggcctcacccagcccagtttgtccagcacacactggtcaaactttgcctgctgctggcggcagtgacgaaacagctgcatgttggagtaatcaaggcaagtccagt

SEQ ID NO: 2695 - DNA, 537 bp, Mus musculus
  misc_feature (1)..(537): n is g, c, a or t
gaaggagacgggcgacacggccgagggcacctggtcagggtcgcggctaccgccgtcatgccggggatagtggagctgccaactctggaagagctgaaagtggaggaggtgaaagtcagctcagctgtgcttaaagctgccgcccatcactatggggctcagtgcgataaaaccaataaggagtttatgctgtgccgctgggaagagaaggacccaaggcgctgcctgaaggagggcaagctggtcaacggctgtgcgctgaacttcttcaggcagataaagagtcactgtgcggagcctttcacagagtactggacttgccttgattactccaacatgcagctgtttcgtcactgccgccagcagcaggcaaagtttgaccagtgtgtgctggacaaactgggctgggtgaggccggacctggggcagttgtctaaggtcaccaaagtgnaaaacggatcgtcctttgccagagaatccttatctctcaagagcaaggccagagcccaaccctgtgattgaaggggatctgaaacc

SEQ ID NO: 2696 - DNA, 530 bp, Mus musculus
gctgctaatctaagcttttattgcacaagatgcttcgggctagggaggtggaaatgaggaactcccaaagctatccagtcaagacccagtttggtggagactgaagcacaagcaatagggatctcacttggaagggagaaaaagtgagcttcagacggttgtcctggagggaaaggtgaccagtggggtctcgctgctccaggaggtcacaaagggtggcctcctgaacaggcaacgacgtgtgcagccagcagtccacatggctgccatgagcctcgtacagccttagaaccagtgtgcggtgctgatggcacctctcagcctgcttgatggtctccagcactactgctggtgaagacacagaaaaggcactccaggtggtgtcaggggccgggcctggagccggcagtgccagcaggggaaggttgaggttgtaggcagcatggatgacaccagcttcttggaaggagcccttgtgtggcatcaaagcgtaagtgaattcatggcgccccatgtcagcagtagcgtct

SEQ ID NO: 2697 - DNA, 585 bp, Mus musculus
ggatgtcatggattaccatctagagacacggaagcctgtgctgggccaggcagggaccctggcagtgggcactgaaggtggcctccggggcagtgcctggttcctgctccagatcagccccaacagccggctcagccaggaggttgtgctagatgttggctgcccctatgtccgcttccacactgaggtgcactggcacgaggcccacaagttcctgaaggtggagttccctgctagaatacggagcccccaggctacctatgagatccagtttgggcacctccagaggccgacgcacaacaacacctcttgggactgggctcgctacgaggtgtgggctcaccgctggatagatctgtccgagtgcgactttgggctggccctgctcaacaactgcaagtatggagcatcagtacgaggcaacgtcctcagcctctcactgttgcgtgcacccaaggctccagacgctactgctgacatggggcgccatgaattcacttacgctttgatgccacacaagggctccttccaagaagctggtgtcatccatgctgcctacaacctcaaccttcccctgctggcact

SEQ ID NO: 2698 - DNA, 362 bp, Mus musculus
caaagaaccgctttattgatactgggaagcaggtttggctgcccgctcagatggtcctgtaaaaaatacctgggagctggggcagccccggctaggcacagttgtcactgccacagcagaagggcacaagaaaccctgatgagaatgcagtctgggggtgggcggggatgttcaaacccacactggctgggtccccagaacatttttggcaaacacaaatccttgccttggctcggggctgttggcaaccagtttcagacataagggctggcccaggagccgtggcaccagtgtccctgcagccacttccttggtgaggaattgtaccgctgaggtacaatcttactgcaaatggggatctg

SEQ ID NO: 2699 - DNA, 600 bp, Mus musculus
ccaaaaccctagcccagccggagctaaacgggcttgacttgggccggaacgaggcaccagttccccgcagatcgcagagtctcagagtggatggaggaagcctagccttgagattaacgctagcctggccgctgggccgacggaacccgcaggcaggcgagcccaagctacccagggcctaacgacaggtccctggcaagaagactttctcctcgctttggaactacaaccggatcaaaccggaaccagagccttcccacggaacagaagccagtgaagtagccgggcccgggcctcccgtcggggccgaactgggacgaggccccggggaggcccctaggccaccttccacacattcccttaagccaacgtccgccaggaagatgcaacgcgccctacctggtgcccgccaacatctgggggccatcctggccagcgccagcgtggtggtgaaggcactgtgcgccgtggtactgtttctctgcctgctttccttcgctgtggacacgggctgcctggccgtcaccccaggctaccttttcccacccaacttctggacctggaccctggccacccacgggctcatggaacagcacgtgt

SEQ ID NO: 2700 - DNA, 497 bp, Mus musculus
aaaatgggagacgcagttttattgatgtcacatctgcccgaactccaggtcccaggtctgtcaggtacaaagattcaaggccctgatgtggtcacagtcaagcaatggctgccgtttccttgtctttctgcgccaggcaatagtgtacctcgggaagcgcccttaatctttctgcggcctgttcgggagtgaggtcacgctgggcctgggcaagcatttcatagccaaccatgaacttccggacagttgcggatcgcagaagtggggggtagtagtgggcgtggagctgccagtggtcacaggtggctccagtctttaatcccgtgggagccccatgccagcccatggagtagggaaaggatgtctcaaatagattgtcgtacttggtcaagagcttcttcatgatggaggcgagatcatcacgctcagcggggttcagctcaggtagccgccgcacgtgccgccggggcagcagaagtgtctggaaaggccacact

SEQ ID NO: 2701 - DNA, 609 bp, Mus musculus
acccgaatccgtggcgggacgaatggacacagcaaccagttttcacagatgctctccagagaagtagctacaatccggtgtgcaggagaatcatcaaaacaacctggggaagtgagcgtggcggtcccgagccccgccctcaagtggcaggctgtgcccccaccgtcacgtgttggcgactagccaatcatccagggtgggcggggggaggcatggaatggggcgctcaccttgtgtaccttaggtcaattcgtgtggcctcacgtcgcatagcggagccgatcctgagcagcgccagcaggcttcagaggcggacgccatggcagcgaccttccgggcgagcgaacaccagcatattcgctacaacccgctccaggacgagtgggtgttagtgtcggctcatcgcatgaagcggccctggcaaggacaagtggagccccagcttctgaagacagtgccccgccacgacccactcaaccctctgtgtcccggggccacacgagctaatggggagtaggtgaatccccactatgatggtacctttctgtttgacaatgacttcccggctctgcagcccgatgctccggatccaggacccagtgaccaccc

SEQ ID NO: 2702 - DNA, 551 bp, Mus musculus
aacatcttaacatttattataatttgtgtacattaatgtggattaagcaaggataattaaaaacggaaagcaattaaaaagaagcaaatcaatgcaaaaccatctctctttgttagctgcagaattttgtgtctaagacacaaaagggctgttttggattcaaatcaatactagccttacaagctgtctttgagtatattttatatttctaaaactccttaaatggcagagtacacctttaagtggggaagccatccgatttagagccttttactcttgtctatgaggcctgcactgaaatgcctagataattaagggactgacttagttttctcttactaattcatttggcacacatatgttattggccactctctgctaagtcccatcctagagctgaacttgagaaagaactagttcataattagtattggggtgtggcacaatgtactccttcttcccttcagagttcaggtaacagataaatagtcaaataaatagaatgttcttctctggttacctggtaggaagaacaagcccattcaaagtct

SEQ ID NO: 2703 - DNA, 605 bp, Mus musculus
gcttctaccaaagggatatctgtgtctgtttgaattttgttagttagttaaaatctttaccctcagtattgctgaacttttatcctctgaacagcttttaatgtgtgtaaatcagggtaaagaaaacagatacggtttcttgagacttctgttcctactgtgaaatatttccctgaagcgtagtgttagaaatggctttgaaaagtgtgaaattcaccccatctctgggcttcttgggtccctccttgaaacactacggtaatttaattgctccctttccctctcctccagagtctttcacccagagacgaatttggcttatgtaacttctcaaagaaaagcttgctatccagtgaaacgtcaagtaggctctctgccctgatcgtgcagcattttgtgacctgttttctagtcctgaatctgtctcaaactaacatcaacttctaggttcccaggtacttaaaacactaccagttgatgtctggcacagcagaggcaggttcgtccctgcagtttgctaatatgctgctctaagtcaacctcactctgctgcctttgggctcagcattaaattggaagctccttgaaaggaaaaaaatagtcct

SEQ ID NO: 2704 - DNA, 567 bp, Mus musculus
gagcgtcacgtctcgtgcgtgttcattcagccacgatgcctgaggaaacccagacccaagaccaaccaatggaggaggaggaggtcgagacctttgcctttcgggcagaaattgcccagttaatgtccttgatcatcaataccttctactcgaacaaagagatctttctgagggagctcatctccaattcatcggacgctctggataaaatccgttacgagagcctgacggaccccagtaaactggactcggggaaggagctgcacatcaatctcattcccagcaaacaggaccgaaccctgaccattgtggataccgggattggaatgaccaaggccgacttgatcaataaccttggcaccattgccaagtcgggcaccaaagccttcatggaggctttgcaggctggtgcagatatctctatgattggccagtttggtgttggtttttactctgcctatttggttgctgagaaagtggctgtcatcacgaagcataacgacgatgagcagtatgcctgggagtcctcagctgggggatccttcacagtgaggactgacacaggtg

SEQ ID NO: 2705 - DNA, 431 bp, Mus musculus
ggggggccataaagccctttatttcataattgccattgcacttatggataagggcacttgggttacagcaaaccatggagagagggtcaaagactgacaggaataccctttgctcagggagaggagaaccggccacagaacaaaattccattggtcttaacatggggaatgaaaaaaaggaaggggtggtcggcacaaaagcggggagtgaatctcatgcacctcaccgtcatcatgccagctgtagcagctgcagcctctgtgccctcctcattaacctccacaaaggccttatgcacaaccttaaacagaaacaagccttgcttggaagacattccaaaaaagtctgccctgccgccaaaggcatcagtcatgcccaacttgtagagggcatcgttcatgttataattctcctccagcttaaactttgg

SEQ ID NO: 2706 - DNA, 571 bp, Mus musculus
ggagatgtccaccagggcttccagtcccttctcaccgaagtgaacaaaactggcacacagtacttgcccagaacagccaacaggctcttcggggataagacttgtgatcttttagcgtcttttaaagattcctgcctcaagttctatgaagcagagttggaagagctggactttcagggtgctacagaggagtcccgacagcacatcaacacctgggtagccaaaaagacagaagataaaatcaaagaggtgctgtctccaggtacagtgaattctgatacatcgctagtccttgtgaatgccatctacttcaaaggaaactgggagaagcagtttaacaaagagcataccagggagatgccattcaaagtcagcaagaatgaggagaaacctgtgcaaatgatgtttaagaagtctacctttaagatgacctatattggagagatattcactaagattctgttgcttccctatgtcagcagtgagctgaacatgatcatcatgcttccagatgagcacgttgaactgagtacagtggaaaaggaagtaacttacgagaaatttatagagt

SEQ ID NO: 2707 - DNA, 450 bp, Mus musculus
caagctctaccaacttttactttcatgagtaggaaagtgggggtggggacgggacagggggcttgtcagctgttaaattctgtgcccaggacagcaactgctgcctggcgcccactctctatacagtcattgacagcaaccccctcataggaggctccagccaaagtcaggggcaacctctgggccgtcaggaattgcatagctgagtctagtttttgccaggggcctattgtatactgagggatacagttcttgtgtagatggaccaggcagtgactcgggggttctttcagtcctaactgtgtggcggctgcctcctgggcttgttgctggaacagctctggagacagttgggggcccgcagcttttagcttctgtagccagtaacctcccaacatcacagtcactctgaggcttggggggttcccatcctgttcaggaaaagccacc

SEQ ID NO: 2708 - DNA, 584 bp, Mus musculus
gacaggatggactgctcctagggcctctatcagtcactcactttctcgggttccccctatctcgtgggtaagttctggcttcagaacgaagaccttactcttccaccagcacgtacacgcgcgccctgcattagttgctcataaatcagccttacgatgggccggactgtgatagtacttggcggaggtatcagtggattggccgcaagttatcatctgatccgaggccccagtcctcctaaggtgatcttagtggagggcagcaagcgtttgggaggatggatccgctcaatccgaggatcagatggtgcgatctttgaacttggacctcgagggattaggccggctggagccctgggagcccggaccctgctcctgggcttgtggagaacaggtttctgaacttggcttggagtctgaagtcttgcctgtccgaggggatcacccagctgcccagaacaggttcctgtatgtaggcggtaccctgcaccctctaccctccggcctcagggggctactccgtccttcaccccccttctcaaaacctctgttttgggctgggctgagggagttgctgaagccca

SEQ ID NO: 2709 - DNA, 484 bp, Mus musculus
ctgagaaaaggcactttattccaatgtagagggggggagggagggaggcaccaagagcaattctaaaaccctgtcaatatccgtagcctaaaaggtgaacctacagcaggtcacaccaacctccctgaagggaactggctggattgggtgggcagaggaggaggctgcacacactcaggccttcccactcttcccctgggacacacgggtctctgggggtgccctgcggaaccactctgaccaggagccatcgtaaacagccacatcgggtttgccacaaaggtaggcagccagggcaacgtgacaggcagtgacccccttgcggcacgtggcaatgaggggctgtgagaggtccaccttcttgtcctggaatatggcacgcagctcctctgggctcttctcgaagccatctttcgtcaggaagtccatgaagggcatgttgactgagccacggatgtggcccgagtctagtcctactatatcc

SEQ ID NO: 2710 - DNA, 581 bp, Mus musculus
caagggcgagtgccagcccagttacttttgcgactgagtgcagcgagccgcccaggatggagccgctagctgggtcctggcgaaagcagggcagagtgcctggagccctttcaccggaattggacattctagaagccagagaactctggctgcaagaaacgaaagcagaagggtaatcagtgcgcccggagaggcgactggaaggccatctctgacttgtgtttgtttttcccattcttgaagacagagtcctgagccagcccctcccaccaatttgctgctatagtaatgcaccgaagctcttagccacgcccacctgccctcctaggcaccagaaagggagggcgccggggaagtgggaggggtggagcaggctttccctagggaatgtgccaacctctcccactgtgagtctggctctgagtgtagttacgattgcacgctgggaaaatgtagtgggagcaacagccccgccccctgggctccgcccaccgcactcagccctctcaggcctgtctctttcctggttcccaaccgcgccaggtgactcgcagaactgacactatggtacatcaggtgct

SEQ ID NO: 2711 - DNA, 418 bp, Mus musculus
gaatgatattctcttcatttattggctctctttcaattattcacgaggctggggaagagaaaaatggaccactgaagtcgcagacgtttaggcaaaagagggatttaccatcctatctaccaggccacgattctgccgggagggcctctctggaagggctctggcccggttcgagcaaacaccctgggttctttgtttccgtcacagaaatgtcctgacagttcctttctttccgatctgccaagcctccaaggggaagaagcggataacgatccgggcctggcccagggacagctcctcggtgaggaacttgaagaagctggcgctgtgagtgcggttctgctccgcggtgcccacaaccccgatggaagagaccagaaggtgagtacaaggctctgtggatttggtcatcaacagg

SEQ ID NO: 2712 - DNA, 535 bp, Mus musculus
cggctcccacagctcacccggtgcagttaccgtttggcgatcccactcttctcccgctaacatgccattcgttgagttggaaacaaacttgccggctagccgcatacccgcggagctggagaaccggctgtgtgcggccacagccaccatcctggacaaacccgaagaccgcgtgagcgttacgatacgacctggcatgaccctgttgatgaacaaatccacagagccttgtactcaccttctggactcttccatcggggttgtgggcaccgcggagcagaaccgcactcacagcgccagcttcttcaagttcctcaccgaggagctgtccctggaccaggaccggatcgttatccgcttcttccccttggaggcttggcagatcggaaagaaaggaactgtcaggacatttctgtgacggaaacaaagaacccagggtgtttgctcgaaccgggccagagcccttccagagaggccctcccggcagaatcgtggcctggtagataggatggtaaatccctcttttgcctaaacg

SEQ ID NO: 2713 - DNA, 539 bp, Mus musculus
cgacttgtacaaattttttattttcatatacaaagtgaacttgcatcacactgtgaaaagagaatggatatcttatttccatagtaaatggaacaattaagaaattgaatgaggaactgttaatcttgatctacatatagcaaaagaatgttgttagtaactcgggattttcaactttgaatatgaacttctatattacaattgttgacaggcagcctttgagtgtgtagtaaagtcattctaaagcaacacttagcaaatatgtacaggattgcattttagtgccattctatcttctagtttaaaatagagttaaaaatcacagttaacccccaaattgtcatagagattgcagaaatatcatcacccagtgcagagatactatcttctagagaagtaagcttgacagcctgtgcgatgttggagacctcagaggtgagactggcttcattgtctgcctggattgcaatgtagagctggatgccatttgctattttaaaagtttctggtttgaatttaaatgtttcttttgagccagc

SEQ ID NO: 2714 - DNA, 566 bp, Mus musculus
gcaacgacacgttctttgttatcacctggatggtaaaaaagccagaaatcattcttcaagatccaaaaggaaaaaaatatacaacctcagatttccaagatgataaactaaacatccggtctgctagacttcatataccgggcactgcagagacaggtacttggacttacagcatcacgggtaccaagtctcagttgattacaatgacagtgaccactcgagcaagaagtcccaccatggaaccactcctggctactgctcacatgagtcagagcacagcccagtaccctagccggatgattgtgtacgcacgggtcagccaaggatttttgcctgttctgggagccaatgtcacagccctcatagaagctgaacatggacatcaagtcaccttggagctctgggacaatggggcaggtgctgatactgttaaaaatgatggcatctacacaagatactttacaggttatcatggaaatggtagatacagcctaaaagtgcgtgtccaggcacaaagaaacaaaaccagactgagcttaagacagaagaacaagtctttatatata

SEQ ID NO: 2715 - DNA, 478 bp, Mus musculus
caaaggcagacctgtggtttacttactctgccaatcagctatctctctgggcaagcccagggccaccctgcccagagggtcttccctggccctggtcccttcccacccctaaaaggcactgtaacaggtggagggagtgaagtagccgcagcaatggctgcaaacatggtgccccagtgaagtagcctgggggagcaggaacaggagcaaaagtcaccctggaatgccaccctggctgctcagcatgttcgcacagctgactagcacagggggcagcatccactcagagcaggacccccttgtgctggctagggcctcacttgtcaaagtggtccagggggtagtgctccccgtaagtctgcaggtgccgtgccagcgactcctgctgcctgcggagctgggcgggcatctcctggtacacatcggagaagaggaggcttgggttcggctttagcttccgctcagcctgctcaaaggc

SEQ ID NO: 2716 - DNA, 569 bp, Mus musculus
tgatgtctgcggccaagatctggaggccgagccgtggcctgcgccagactgctcttctcctgttgggacgatctggggttcggggcttggctagatctcaccccagcaggcagcagcaacagcagttcccatttttggacgacaagccccagttcccaggggcctctgcagagtttgtagacaagcttgagttcatccagcccaatgtcatctccggcatccccatctaccgtgtcatggaccgccagggccagatcatcaaccccagtgaagatccccacctgccccaggaggaggtgctgaagttctaccggagcatgacgctgctcaacaccatggaccgcattctctatgagtcccagcggcagggccggatctccttctacatgaccaactatggcgaggaggggacacatgtgggcagtgccgctgccttggagcgcacagacctggtgtttggccagtaccgggaggcaggtgtgctcatgtaccgggactacccgctggagctgttcatgtcccagtgctacggcaacgtgaatgacccaggcaagggacgccagatgcct

SEQ ID NO: 2717 - DNA, 606 bp, Mus musculus
gactgttaaaatgtcacttttattttagcacacctgagttaagtgtgggacagtgaaacaaatacaacaggatatatacagcatgtcaaggaggcaggctttaaaaccatgctatagaaaagagaagactgggaggacgcccgatttaagcagctttggatcctgattaatggatatgcaaatatagtattctccagtggatttggcaaagattttgtttttcatttccagtcttttaaagtagacagctgattttcagagcacataagatttaaatacaaacaagagaattcagcagagtgataaaggtgcctgcaacaaaactgaccacccaaggtaatggtggacagcaaggcgagaatcctcatcctgcaaagcaggacgagggggaactgcaaagtggggttcgtgggtaaccttagcttctacttgctactcagttcacaaagttagaggcctttacagataacccgcacgcaccctttaattttctgctatgtaataggattataaggccacaatattcctttggggaaaaccctttaatgattttaatatcacttacttgttcttttgaagtgtaaagtgtcttaactggattatgat

SEQ ID NO: 2718 - DNA, 678 bp, Mus musculus
atattccccccaaggagttcctttttaaacacccgaagcgcacagctactctcagcatgagaaacacaagcgttatgaagaaagggggaattttctcagcagactttctgaaggttttccttccatctctgttactgtctcatctgctggccattggctcggggatctacattggaaggcgtctgacaacttccactagcaccttctgatgaagatttggatctgacttctgttcacacagtgaggattcatgtctgagctgtgacagctaattgaagagctagcatggtccttgggtgtttgcactatgtgtgttaatttgttctgtaaatgcggtgttcctgatttagtgagacggaatagactcttgtcatgacctataattatacctatgggatcaattaataagcatgtcagactgatgcctattgtagcatttactagtaaatttctttgaatattagatataaatagtaaatttctttgaatattagatataaatagtataaataattttaatatagtagcaatggtgtatttaaaactgatctgtaatcataatccagttaagacactttacacttcaaaagaacaagtaagtgatattaaaatcattaaagggttttccccaaaggaatattgtggccttataatcctattacatagcagaaaattaaa

SEQ ID NO: 2719 - DNA, 502 bp, Mus musculus
gggattacagaaaagagagtttattctatacacgttctgcatctttgatttttatatgagaatcatagtgcttatcaacaattggtcagatacattttttttaatacactataccctggattctgacccagtgaacactgggttcagttttcgtctcccatctctttcttgatccagtcaacataattcagtaccttggtgtagaagccatatccctcaccacacccaatgccccaggatacgatgcccgtagccacccaaatatcacgatttctgtccctgactgcaaaaacacccccactgtccccttggcaggcgtcttgctgtacagctgggtccccagaacagaacatattttgagaaaatggagaagtatccttttttgtctggagccatctctggcatgcctcactgtcagctacaggcagtctgacgaacctgagatcgaaagctaacttatcttctgttatcccgaatccgctgacataacccatgaggcctt

SEQ ID NO: 2720 - DNA, 594 bp, Mus musculus
cttcattccctgaaacattcctccgggaatggtcaccccctccactgccacaatccttccctcccctgtatgcctactccctccttcaacttacagtgcctgaagactctgtcaggagagctgaggacccaaaacaaactggccttgagacatgtggctctttgccctcctggtgaccctgttctatggggtggaaggctccatttacctccctcagaagctctatggagaggtgacctcccctctgtatcccaagccttaccccagtgacttggagacaaccactgtgatcactgtccccatggggtacagggtgaagctggtcttctggcagtttgacgtggagccttctgaaggctgcttctatgactatgttaagatttctgctgataagcaaacactggggaggttctgtgggcagctggattctcccctgggcaaccccccaggaagcaaggaattcatgtcccaaggaaacaagatgctgctgaccttccacacagacttctccaatgaggagaatgggaccatcatgttctacaagggcttcctggcctactaccaggctgtagaccttgatgaatgtgcatcgca

SEQ ID NO: 2721 - DNA, 579 bp, Mus musculus
aacattgagcttgctttatgggtgaaggctggctgagctgggctgggctgggctggggatgaagatgaagatgtgggcttagctgtagaaagggctgagggctcagggtctggtgtcaggcctcctcactgtgagtcatcagtacagaggcacagggaggtgaggtgggaagtaaatcggggtgcaggaaatgggaagagaatgggactgggcagaggatgaagaaaaagacagggcagggctgggaagcagggtccaggtcagcatggagaggctcagaaaggtgcctcccgagattggtaggcagccattagggctcttttgagctgctcataggtgacaaacatcactacgttccaggatcccaagcggagaaaggaaggcatgaaccccttgtagaaggcgcggggtccctccttccggagcatggtaagggcacagtgacctgcgctgtggtactggcccaaggcagagttcatgtatctcgtcttgaccacatcaacaggggaggcgatgacggtggtgcagaagccggccccgaaggcagaagtgaagtggcaagggaggtcatctgtcatg

SEQ ID NO: 2722 - DNA, 626 bp, Mus musculus
  misc_feature (1)..(626): n is g, c, a or t
tctcccgccgtcggacacagccttctgcactcctgtgctctcctgcggtccggacacaatagtatgaactttaagtgtttcgtctcccagccattttctatggaaaatcgaggggatcgggccatggtagctctttttagctttgaagaacgagacacctttagagaagcttgaccttggaggcctcagcctgagacctcaaagcagcctccagaactccggcagagttcctctgtctcgtcttgccgattgaaggtccccgtttctccaatttctctccatcttctgggaggtagcaggaaatcagaatcatggttggtttcaaggccacagatgtgcccccaacagccactgtgaagttcctgggggctgggacagctgcctgcattgcagatctcatcactttccctctggataccgccaaggtccggctgcagatccaaggggagagtcaagggctagtgcgcaccgcagccagcgcccagtaccgtggcgttctgggtaccatcctaaccatggtgcgcactgagggtccacgcagcctctacaatgggctggtcgccggcctgcagcgccagatgagctntgcctccgtccgcattggcctctacgactctgtcaaacag

SEQ ID NO: 2723 - DNA, 152 bp, Mus musculus
cctcaacaaagcatttattactcccactcaggggttcccgggggctttgaagttaggtcatacataattctaaaaattccaggaattttttttttttcagggaccatttttagcaccacctttacaggaatctcattgccaggggttgcagg

SEQ ID NO: 2724 - DNA, 621 bp, Mus musculus
cgctgttaggttccgggctgctcttgttcttcacgcttctgccggtcccggtgttgagcctctggcgtccaggccttgccagcagtctgcacccgcggcgttggtccccgatggccctgtgcaacggagattttttgccggagaatgctggaggagatcttaaggatggttctcaccattacgaaggagctgttgtcattctggatgctggagcccagtatgggaaagtcattgaccgaagagtgcgggagctctttgtgcagtctgaaatcttcccattggaaacaccagccttcgccataaaggaacaaggatttcgggctattatcatatctggaggacctaattctgtgtatgcagaggatgctccctggtttgatccagcaatatttaccattggcaagcctattctaggaatttgctatggcatgcagatgatgaataaagtcgttggaggcactgtgcataaaaaaagtgttagagaggatggagttttcaacattagtatggataatacgtgttcattattcaggggcctgcagaaggaagaaattgttttacttacacatggagacagtgtagacaaagttgctgatggattcaaggttgtagcacgttctg

SEQ ID NO: 2725 - DNA, 623 bp, Mus musculus
atggagaggggtgtgttcaagacagggtttctctgtgtagccctggttgtcctgaacccacttggtagaccaggttaacctcaaactcaaagatctgcctgcctctgggatcaaaggcatgcaccacctcaccaggtttaggatttggaatctttaatgataaattagtgagaagtaactcaaaatattactaaatctagttgagatccacatgaaaataacaatttaaattatcaatgctttttaaaaaaaaaattccgcaaaataaagaaaatgagtaagctaatcatttgtttgctgaaagttttgtttttcttcatataaaaaagcctaaaaatgatagtaacatagaaagcagctaaagatgcaaagaaagtaaaataatgtgcaataaacaaaccagtgcacagaacttattgctgtctgacctaacactctgctacactcttttctattatatcattttaaacctgtagagatctgaaataggttagaaaattacaataaaaaagtaagactgatctcatacattacaaaaaggaaatctcttataaagtaataaaaaggatgacaacccaacacaaaaatgtccacagactaaatgaatgaacaattcacatatt

SEQ ID NO: 2726 - DNA, 568 bp, Mus musculus
tcgttcagaagccagctgcacttgagtgacagcaggtctggttgggagccacgcttgaagcttgaagtcattagtgaccatgaagagctgggtttgtgaaaggccatttctgtgcttttcagggctgacagttttcttagaggaccctagacagggaaccttcaaggtactttcttctttaactatatgggttttgagtagctgcaggattctgaggatgattttagtgctgactcatttcctagagctgggcctgatgaagttgtatttgtaatctgttttgatttcaggcacttgctttggataaatgcagcggcaatggaggtggagatgtccaccagggcttccagtcccttctcaccgaagtgaacaaaactggcacacagtacttgctcagaacagccaacaggctcttcggggataagacttgtgatcttttagcggtaagtgtcattcagagacggtaggccaaggattcaccttactccattgcccactaataaagttttgtatttgtttacaagctttgaaactatatgtgagtatattcctattgtacagaatatct

SEQ ID NO: 2727 - DNA, 619 bp, Mus musculus
atgactccacttcctttattgcagtaacttctgtacaaagcagcaaccgcaatgctcagggttaaaacattacaaaggcgtctgtcacaggaacagtacagtattatcaaaatattacatttcaaacttagcagataatcaccagagctcaactctttaaattatttccatagtcttaaaaaaaatacacacacacacacatacacacgtcagaaagcaatatgaaaaaaagtagagaggaaaacttaaaagcacaaagagaaagacgcaacaaataaatatctgatttagttacctgttaataatcaacaccaatgtcccctttgaacccaccggatgttttacctatcataataatgagctcaaaggccactgcataattatttttaagttattatcaacgattaggactaaaaaataatttggcatcaaaataatcaaaagtcggcataaaataaaaatagctttaatgctagctagcatctctaagaactaatggttgagaattttcactttatagagtacgactgcaaccttgagactgtttgaccaggcagccagtgttagccaccgtaatggtagtttttaaaggtggaaacctgctgctaacatcacatca

SEQ ID NO: 2728 - DNA, 608 bp, Mus musculus
ttatgaattatttcttttaaatcatagagatgactgatgatctacccagtaattcttgtataatgcttttaaaaaagaatcatgtttttttttttaaacaaaaccgtgagatcatttgtattatttttaaaagatctcttgatttagaattttctctcaaatgtgagggacttttatgacatgctaacatattttttttagaggaaatttagacaaagcagtgccatttaatagaacatttcaataaacactatggggatttcactgtcctatgccatcctttatttaaaaaaaaagattaaaattttaccaatggttaaaaggagcactgtttccttagtgaaatggttttaggcttcatttattcaagtatcaagtacagttagttttaatacactcaggattgaacagattgttctgaacattgaaacttaatccattcttaatactttaaaacttgtgttaaagaaaactgccagtttgtgcgtttgaccttgtctgctaatgcactcgacagcgtgcatgtgcacatgtgctgcctgaaagctttatatgcagacagacagcgcgcatgtgcacacgtgctatcctgaaagctttatatacag

SEQ ID NO: 2729 - DNA, 520 bp, Mus musculus
ctctgtgacaattgattctaggtaatctttgggactcaagatatgtagctgcatttctgttctgcctggctttgtaagtcactttgtggcttaaaggaccagaaacagcagggagtttggttttgccatcactacagcatagtcaaaggtcgtttgccacagcgaccagcacagaaggttgaaacatttaccaggggagaagtgaagaggaagagagatataggatagtcaaacttaggattaactgtctaagagagccggatccggatgacgtccagctgtaaggagaggaggggtgggcagggcagagcttcctcccccaggagtccaaagcagacaggctgtctactgtctggaaacactcaagatagacacttgtcatttctctgtgtcgctttctttgtacagcagccatgaagcgtcgctgctgcaagtgcttgtacctgcattgttgtgcttctgtgggcgagaatccagtgtgtggacagggccagcctaggctgctgcgggcaagtatcac

SEQ ID NO: 2730 - DNA, 554 bp, Mus musculus
gagcaggctgtggagcagtgtgggcgggagaatgacgtgaagcatctagtagagcggatgatggcactgcagactgacattgtggacctgcagaggagcccgatgggtcggaagcaggggggcaccctggatgacctagaggaacaagcgagggagctctaccgaagactcagggagaagccaagagaccaaaggacagaaggtgacagccaggagatggtacggctgctgcttcaggcaatccaaagctttgagaagaaagttcgggtgatttatacacagctcagtaagaccgtggtttgtaagcagaaggcactggagttgctgcccaaggtagaagaggtagtgagccttatgaacgaggacgagaggaccgtggtccggcttcaggagaagcggcagaaggaactctggaacctcctgaagatcgcctgtagcaaagtccgaggtcccgtgagtggaagcccagacagcatgaatgtgtctcgactcagtcaccctggtcagctaatgtcccagccttccagtgcctgtgacagcttacctgaatcaga

SEQ ID NO: 2731 - DNA, 1150 bp, Mus musculus
ggagggcaagggaaggccacttttattgagcaaatttcccaggacctgtgaattaggtcttccctctacccccagaggtagaagccctaagccacctcccccaggtacaaggccaccgactgtacacctgtggtctcccacgaggagcaggaacttatttggcaagagatgaatatgtgagcaactacctgccagtaagaaaaggacaaatagctgaagggaatgggcaggccattgcaggtagtgtgtgtgctgtcccatgggacaggacctcaagggcctggccttcctactctcaggtactggctggactgggcattttctggctgaaaagcttctgttgagaggcttgaggtaaggtcggccagcctgccaggctggagtaagatcactcagtctctaggatgaggtcgtcgccttccagagtcatgtccttggtaacatggaacctttcggatagtgccctcaatgggggaaatcaccacagtctccatcttcatggcgatgagcacacaaaggggctagcccttagccaaattgtcccctgctgcaaccttgaagactatgacattccaaagacataggggaccaaatttgtcccttcaaacacttcaaagactgtgagatgggaatagaactccttcaagggactgagtgtctttaacaagaatgaataaaagctacccattcacttaaaaggaaagctagctcatgccaaaaaggaacaggaaacttaaaccaagagataaatgtaaagggacttgaccattagaagagaacctaaaaacgccaggaaaattggagaagaaaagaaaagaacagaaaaaaggcacaaagagggaaaaaaaaacgggaagactgaagagaccaaagaaacggggaaaaaaaaaaaaaaggaataccggggagaaaagacccaaggaaagaagaagaaaagagaggaagaaagaggaggaaaggggaagaacagaagaaaaggaaagtaggagaaaggggagaaaaaaaaagggaaaggaaaaaaggggaaaaaaaaaaggaagagaaagaggaaaagaaagaagaaagagaaaaaaagaagaaaggggaagaaaaagggaaagaaaaagaagcaaaaaaatgaggaagagagcgaaaagaaaaaaaaaaaaga

SEQ ID NO: 2732 - DNA, 661 bp, Mus musculus
gggccgtcagaggcggcggccacggctagaggcggcagggcggagctaacatctaccttctggagagctgacaacactaatgatgctgaagttccaaacagttcgagggggcctgaggctcctgggtgtccgccgatcctcctcggcccctgttgcctccccaaatgtccggcgtctggagtataagcctatcaagaaagtaatggtggccaacagaggtgagattgccatccgagtgtttcgtgcgtgcacagagctgggtatccgcacagtggctgtctactcggagcaggacacagggcagatgcacaggcagaaagctgatgaagcctaccttattggccgtggcctggcacctgtgcaggcctacctgcacattccagacatcatcaaggtggccaaggaaaatggtgtagatgcggtgcatcctggctatgggttcctctcagagcgagcagactttgcccaggcctgccaagatgctggagtccggttcattggtccaagcccagaggtggtccgcaagatgggagacaaggtggaagcccgggccattgccatcgctgcaggcgttccagtggtccccggcacggactcccccatcagctccctgcacgaggcgcatgagttctccaacacctacggcttccctattatcttc

SEQ ID NO: 2733 - DNA, 645 bp, Mus musculus
actggtcatacccttatttagcataaaaggcctgaaacacacccagtgatctcaataggtgatgaaatgccagtcatcaggatgaaataatacactgattattaccaaaatggaaatacaaaatactctgttggcgtaaaaagaaacattaagctttattcaaagaaatactgaaaataaatgttttacaaattgcaatcaagcaaagtgtaatttagtaatgaattctcagaatctatataatacattctggtgttggccaatgaaaagtttactttaaactagtattttacatatgcttaaccttcaatcaacttaacattcattgattataatgatttaactgttctgtagtatctcagaaataacttctaaatacaatccattcacatcaccaaggaaactgtaacgacgcacgtaaatgactgcaggcctccatctgaaggctgtacgcagatgggtccgttcctccttagaaagtccccacacagtcaaacctcaacaaagagacgcctcgcctctcgctctcacttttctgtcacgcagccacctgcaggttcctaggtgtcactctattatgcatcaactgaaatacatgcctttcaggagacaggctctggccactgcaagcagagtttcacaaga

SEQ ID NO: 2734 - DNA, 678 bp, Mus musculus
atccgaccagttatgatggctttggacccttcatgccaggctttgaaaccatcccatataacgatctgcccgcactggagcgtgctcttcaggatccaaatgttgctgccttcatggtggagcccatccagggtgaagcaggcgttatcgttccggatccaggatacctgacaggagttcgggaactctgcaccaggcaccaggtcctgtttattgctgatgaaatacagacaggattggccagaactggtagatggctggctgtggatcatgagaatgtcagacctgatatggttcttcttgggaaggccctttctggcggtttataccctgtgtctgcagtgctgtgtgacgatgagataatgctgaccattaaaccaggcgagcacggctccacatacggcggaaacccactaggctgccgaattgccattgcggctcttgaggttttagaagaggagaatcttgctgagaatgcagacaagatgggcgctatcctgaggaaggagctcatgaagctgccctctgacgttgtgacctcagtgagagggaaagggttgctaaatgccattgtcatcagagaaaccaaagactgtgatgcttggaaggtgtgcctgcgacttcgagataacgggcttctggccaagccgacccacggtgatatcatcaggcttgccc

SEQ ID NO: 2735 - DNA, 709 bp, Mus musculus
cacttttcattcgtttctttatgaaattaaatgtgtcttttggattagagaagatgcagcgctagagtgactccatgcttctgagtcctgtaggctctgcaccatgtgagtcaccggccatgtgcctcacgaggaggccggccatgaggggccagagtccagtccttatggcttctcacacttaactagggtaaggcaatctttctgtgtcattaacaattctccagtgttagagaaacaacacgaccaaaatcatagtgaacagggagtgagtgggtgggtgtgtgcgcaccaccccagctacagggaactgtcactaacctggaaccagggacacagttgactgtatggttttctcgttacacatgtcacaagtaaagagggtatctggcagccagcagtgtctacagggaccaggaggcataaggacagctatgtatgggtagagttagtgcataattcctggttcctgacctctcaggttacaagtgcactgggggcctgaacagacgaagagcagaggggcacacacctgctttggcagtggctcatggccacagattttggtctcctacccagaggaaacaggagaatggagatgatagctttccaaagaatgtccagagcagatgcgcctatgtgcacagcctggccagaggtttaaaactgtggcgagcaggcttaccaattgatggaggctctgcgcagg

SEQ ID NO: 2736 - DNA, 646 bp, Mus musculus
caatgcctgcgtggagctctcccggctcacgaagctcagcaagtacgtgtacttcttcgaggcctgccggctgctgcaaaggatgattgacatctcgctggatggctttctgctgaccccggtgcagaagatctgcaagtatcccctccagctggcggagctgctcaagtacacacacccccagcacagggactttaagaatgttgaagctgccttgcacgccatgaagaatgtggcccagctcatcaacgaacggaaacgaagacttgaaaacatcgacaagattgctcagtggcagagctccatagaggactgggagggggaagaccttctggtcaggagctcggaactcatccactcgggggagctgacccgcgtgacacagcctcaagccaggagtcagcagagaatgttttttctctttgaccgccagctcatctactgtaaaaaggatctgcttcgccgggacgtgctgtactacaagggccggctggacatggatgacctggaggtggtagatgtggaagatgggaaggaccgagacctccatgtgagtgtcaagaacgccttccgtctgtactgtggtaccacgggggacagccacctactgtgtgccaggaagccagaacagaagcagcgctggctg

SEQ ID NO: 2737 - DNA, 705 bp, Mus musculus
atagaatcacaatatgtttaagtgtatcctcaagagatgacactactcagccctgtagcggtccctgacaatcctgtggccagtgacttcttgaaggcacagagctaggaacagaggatgtgcttcaagtctggccacagctctctcttgtgctgccgatgctctgtgggatgacatctggctcaggatcagatcagcccggtccactgtccatactggaaggaacattgacatccaaggatgcctgtgcagttgcattgggagccaatggtctcagcacctagtcatagccagtatcttcccttcatgaaggtatttgcaactttgctgctcattcctggcagcctggaagtccttgttgctgctcaaccctgttggctttctttccccccctaggggagcttagtgtcatatgtaaacatagacaggtccctggggtctctctggataagcactggaaagaagctcaatcccccaggctagctgcagtaccagctgggaccaaggcctgtctgtgtgcacagcaggatggggtctgggactgtggttccagagacctgacttcaggagtggaaacctgcatgctgactcctgcctgcagcactgacagacacacatggtccactttgtgcatatcaccttgattgtttttcatgtccatcatagaaaagagtgattaaaaatgaaagaaaggagaaactggga

SEQ ID NO: 2738 - DNA, 566 bp, Mus musculus
tccaaggtgtatgaccagcgagcaccgctccttgccgtggacaggatctcccttgcggtccagaaaggggagtgcttcggcctgttgggtttcaatggagctggaaaaaccacaacattcaaaatgctgactggggaggagaccatcacctcaggggatgcctttgttggtggttacagcatcagttctgacatcgggaaggtgcggcagcggatgggctactgcccccagtttgatgcactgcttgatcacatgactggcagggagatgctggttatgtatgcacggctccgaggcatcccagagcggctcatcaatgcctgtgtggagaatactctgcggggtctgctgctggaaccgcacgccaacaaactagtcaagacttacagtggtggtaacaaacgcaagctaagcactggcattgccctcattggagagcctgcagtcatcttcctggatgagccatcgaccggcatggacccagtggcccggcgtctactctgggatactgtagcccgggcccgagagtctggcaaagccattgtcatcacctcccacagtatgga

SEQ ID NO: 2739 - DNA, 640 bp, Mus musculus
actgataaagggagattttattccatatactttgtgttcctttacaacagatacatatttatggattatataaattcatttttagaaagcctaatgggtatcagtcaaaacaaactttctatcattgtctgcaaattaatcagacctattatttaaagttctaaagtcttgtcaaatactttctaattttcctgttctgcctgccctgttcattgtaatccaccttcctcataattccagtttggcatattagtaaaatgtggataatgtcctttgtatccaacaaatgagtatgcactgcagcaatggacactttgtattgctatttccctgcactcactggagaagttgttttaggttgtccttggttgctcaacagaagactctggagtctaaatatgtagggctggggatgtagctcagttgttagagaacatgcctagcacacacaaagccctgggtttgatcctcagcactgtgtaatccaagcctaggtagtgggctgagaaattcaaggttgtccttggatacctaattcgagggcagcttgggctataggacgacaagctgtctcaaaacaccattaaaaccgaaaccttaaaatccagatacttaggcaccaactataaagactgtatcg

SEQ ID NO: 2740 - DNA, 683 bp, Mus musculus
gtaaaactacatttatcagaatgcttgctggaaggcttaaaccagatgaaggaggagaagtgccagttctaaatgtcagttataagccacagaaaatcagtcccaaatcaacaggaagtgttcgccagttactgcatgaaaagatcagagatgcttacacgcatccgcagtttgtgactgatgtaatgaagcccctacagattgaaaacatcattgaccaagaggtacagacattgtctggtggtgaacttcagcgagtagctttagctctttgtttgggcaaacctgctgacgtctatttgattgatgaaccttctgcatatttggattctgagcaaagattaatggcagctcgggtcgtcaaacgtttcattctccatgcaaagaagacagcttttgttgtagaacatgacttcatcatggccacctatctagcagatcgcgtcatcgtttttgatggcgttccatcaaagaacacagttgcaaacagtcctcagactcttttggctggcatgaacaaatttttgtctcagctcgaaattacattcagaagagaccccaacaactacaggccacgaataaataagctcaattcaatcaaggatgtagaacaaaagaagagtggaaactactttttcttggatgattagatcgagtctgaacttataagccatttacttact

SEQ ID NO: 2741 - DNA, 766 bp, Mus musculus
gacttggtagaaaatttattgttaaggcaataagtactccatcacccccataaagggttttggcatcagagaaggcacatgaccttgccagggcctgattgggagtctcagattcccagggggttaccggtgaccaggccaccattctccaccatggccttggagatgcttctaaagttccggaagagctcctgatgctgagggctggactgcagactggccatgttttacggccctccgagttgcagcctcaatgcaccagctatcacagagcattttctcatgctgtgccgtcgggtagccatcactcagggaccttgaggctctggacagaaccaccaccatggcatagaggtcaatggcgccgtccgccagtcgctgcagcaggaactgctcgttgacaatccctttcttgtgtttcaccagcttggcctccaccacggtggcaaattgatccagagcctgcactgccagttcaccactgcgacttaactctgggtggacaatccctgacagactcaaaccactgccgattcctgtcctccgtctcagctgtttgcctgcttctcccatcaggaggccaacgtttccaaaaggattcttcagggcattgccagcccagtgagttcctttcctttgtccatacagccttgcagagccacaaacagtcgaagaatgtcatttggcccttcaaagatcgggaagattcgaatatctcggagcacacgctccacccctggttccttcatgaagcccatgcccccca

SEQ ID NO: 2742 - DNA, 571 bp, Mus musculus
  misc_feature (1)..(571): n is g, c, a or t
gcccagcgactttatgccagggaggccactcaggcagttctggacaagccagaaaccctctcctctgatgcttccaccagagaaaaaccagccagggcagaatcgaagtcctttgctgtggggatgttcaaaggccagcttaccattgatcaggtgttcccatacccatctgtgctcagtgaagaacaggcacaatttctcaaagagctggtgggaccagtggcccggttctttgaggaagtgaatgaccctgccaagaacgacgccttggagaaggtggaggacgacactttgcagggactcaaggaactgggggcatttggcctgcaagtacccagcgagctgggtggtttgggcctctctaatacccagtatgctcgcttggcagagattgtgggcatgcatgaccttggtgttagcgttaccctgggagctcatcagagcatcggtttcaaaggcatcttgctctatggcacanaggcccagagagaaaaataccttcccagagtggcatctgggcaggctttggctgctttctgcctaacagagccctcgagtggatccgatgtag

SEQ ID NO: 2743 - DNA, 661 bp, Mus musculus
ggggttgaagcactttactgcaggatagggagaagggggctttaaattattcacttaaataaaaatgaggaggggcaggaggagaggacccccagccctcaccccttagtccctctgctgtgcctctggacagcagttacacaggcatgggccccctgcccctcagtccctctgctgtgcctctggacagcagctacacaggcatgggcatctcgttgtactcatccacaccttcacactcgtcaaacactggctttgcctcattatcatccagacatttcatttctcgctcagtgaagattcgggtaagtaccaccatgcgcaaaggcactgtgaggatgaggatgaatgggtaggccagggaagcggctgtggacatgactgcccaaagcagggccaggcagagcaactgcaaggcagtgaacaggtgcatccgcatggtccgaacctttttgacataggtgacatctgggtggtgtttgggcggcatgagcagcaggtgcagccgctcgtagaactggatcccattgagggaggtgactcccatgtacaagaaaatgccaaagagcacagccagggggatctgccgcagaggtccccaatgaccatggagaggcccacaagcagggccaccagcagccctgtcacacgctgttccttg

SEQ ID NO: 2744 - DNA, 688 bp, Mus musculus
cgtgctagaggtgcctgtgcctgtgcgcttcctcttcttgctgctgggtcccagcagtgctaacatggactaccatgagatcggccgctccatttccaccctcatgtctgacaagcaatttcatgaggcagcctacctggcggatgaacgagacgacttgctgactgctatcaatgccttcctggactgcagtgttgtgctaccgccttctgaagtgcagggcgaggagctgctgcgttctgttgcccatttccaacgccagatgctaaagaagcgagaggagcagggccgcctgctgcccccaggggctgggctagagcccaagtctgcccaagataaggcactcctgcagatggtagaggtggcaggtgcagctgaagatgatccccttcggaggacaggccggccctttggggggctgatccgtgacgtgcggcggcgctacccccactacctaagtgacttccgcgatgcacttgacccccagtgcctggctgctgttattttcatctactttgccgccctgtctcctgccatcacctttggggggctactgggggagaagacaaaggacctgataggagtgtcagagctgatcatgtccacagcgctgcagggagtggtcttctgcctgctgggggctcagcccctgctggtcatcggcttttctgggcctctgctggtcttc

SEQ ID NO: 2745 - DNA, 690 bp, Mus musculus
aggggccaaaaggtggctaatttaatataatgtctccttttctagttcatgcacagaaagcctgcgcactaagtgcgagcacgtgcacgtttgtttacacacacagagacacacagccttgtctcccaccagacacaggcctcgaaggagcagctgacaggcaaggcagcacgagggtggtgctttcgctcatcggtctatttctccgaacacaatatcctgggtacctatgatggccacgacatctgccaacatgtgtcccttagacatcttgtccaaaccagccaggtgggcaaaaccgggagccttgatcttacaccgataagggcggctgctgccatcggataccaagtataccccaaactctcccttaggagcttcaatggcagtatatgtggctcctggaggaacttggtagccctctgtatacagcttaaagtgatgaattagtgactccatggacgtcttcatctctgctcgcttcggtggggacactttggcgtcatcaaccttgatctccccgggaggcatcttgttcagacactgctcaatgattcgcagggactggcgcatctcctccacacgacacaggtacctatcgtagcagtcccctcgagaaccgattagaacatcaaactccacctggtcgtaaacgtcatagggctgggtcttccgcaagtcccactggat

SEQ ID NO: 2746 - DNA, 584 bp, Mus musculus
gttgtaacagcggaagacgcacttaactatggattcagtggggtgatgctccgaggctcaggcatccagtgggacttgcggaagacccagccctatgacgtttacgaccaggtggagtttgatgttcctatcggttctcgaggggactgctacgataggtacctgtgtcgtgtggaggagatgcgccagtccctgcgaatcattgagcagtgtctgaacaagatgcctcccggggagatcaaggttgatgacgccaaagtgtccccaccgaagcgagcagagatgaagacgtccatggagtcactaattcatcactttaagctgtatacagagggctaccaagttcctccaggagccacatatactgccattgaagctcctaagggagagtttggggtatacttggtatccgatggcagcagccgcccttatcggtgtaagatcaaggctcccggttttgcccacctggctggtttggacaagatgtctaagggacacatgttggcagatgtcgtggccatcataggtacccaggatattgtgttcggagaaatagaccgatgagcgaaagcaccaccctcgag

SEQ ID NO: 2747 - DNA, 614 bp, Mus musculus
caagacacggaggtgtttgtaatgacttcaaagccggtgccgtctgggctgtgaaagtcaaggggccactggcctggcataaaaaaagactccaggcacatccctgggtctgaggaatgcctggccctggtgctgggttcctagggtctgtgaatcgccaaggtaaggtctcggaggggcaccatcctgcaggtcacacaggcatgtgcagctcgttgtactcgacatgaccatcctcgtcaaagttcggctccgcatcttcagagtccagcgcctgcagctccctgtcctggaagagccggggcaaaaggcaacgcctcagaggcaccgtgagcaagagcaggaaaggaaaggccagcgaggccgccgttgacttgaccacccagagaagtgcaatgcagcccagctggatgcaggtgaacaggtgcatccgccatgtcttcaccttggtcacgtagggctgctcaggatggtgctttgctggcatgaaaatgagcagcagacgttgggacaattggataccagacagtgatgtgacgcccatgtacaggaaaatcccgaagagtacagccaatgggatccggcgcaacacagctcccatgacgatagacagg

SEQ ID NO: 2748 - DNA, 411 bp, Mus musculus
tggccgggcggctccttccctcactgtgtcctaggagcggctctcctggacctggaacagaccaccctgccgggtatcgctcaccttgtggtggagaccatgattgtatctgaccagatccggcctgaggacagggctagtgttctgaggactctactcctgaaacacagccatcccaacgatgacaaggacagtggctttttcccccgaaatccgtcaagctccagtgtgaactcagtcttggggaatcaccacccaactcctagtcatggccctgatggtgcggtccccaccatggctgatgaccaaggagagccagccccgttgtggccacatgaccctgatgctaaggagttctgtgttctcagaagcccctgcacatgcctgggggagacggtcaccgagggaaaa

SEQ ID NO: 2749 - DNA, 578 bp, Mus musculus
agtgccccatacctttaatcctagtactgaggaggcagaggcagggggatcgcttagttcaaggccaacctggtctacaaacagagttctaagacagtcaaagaaactgtctcagaaaaaacaaaaccaaagcaaactggcactgtgtgggggtgaacacttgggaacacagggacaggaggactgctgcatggtggatatagtctggattacacagcaagatcccctcccctccaacaaacaagcaaaactagacctagaatttagaacctaagttgtgaatttactgtcttaggaggctgagcatctggatgcctcttactttccataaatcctagggaaggacaagaaagtcaatatcttatattcatattaagacttttatcttctgtgcaaagaggatcgtgtgagtcagcagggaggtctgggtctcattatgagggggctttacaatgctacttccaggcctcacacactacacgagctccaagacccacgaacacgggcaccacacctatgcaccactctccagctccagttaagtctttggggtttgaactgtacaggagctgtggagg

SEQ ID NO: 2750 - DNA, 608 bp, Mus musculus
gtgagagcatgaggttgtcgctggctgccgctatctcccacggccgcgtctaccgccgcctgggcctgggtccggagtcccgcatccatctgctgcggaacttgctcacgggcctagttcgccacgaacgcatcgaggcgacatgggcacgcgcggacgagatgaggggctacgcggagaagctcatcgattatggaaagctgggcgacaccaacgaacgagccatgcgtatggctgacttctggctcacagagaaggacttgatcccaaagctgtttaaagtgctagcgcctcggttccaaggtcagaatgggaactacacaagaatgctacagatcccgaatcggaaggagcaagatcgggccaagatggcggtgatagaatataaagggaactacctccctcccctgcctctgcctcacagagacagcaaccttactctcctaaaccagctgctcctgggactgcagcaggacctgcaccataaccaggacgcaagcctccacagctcctgtacagttcaaacaccaaagacttaactggagctggagagtggtgcataggtgtggtgcccgtgttcgtgggtcttggagctcgtgtagtgtgtg

SEQ ID NO: 2751 - DNA, 627 bp, Mus musculus
ctaggtcggacgaatctttctttaatacaaagttggtttatctacatacaggggagtcacctgctgcttctgcccaaaaaacagcggggacgagtactgacccactctcctacaaagagagacctcagttgctccagggggttggatatcccccaagtgtcccgtagtcccaggtcctccatgcggggcacagaggtcatgagtagacgaggaccctccctggtgtgccagggactggagcagaaaggccagccactgtgtccttggtggccatgtccctgtagtctggcccgagtgcccccagcgcatcaccctccatatctgatatgtctgaagattgattaaaaaaaaagtaaaaaggttaaaaataaaaactaagcgcaccattcacatggggatgggggaagtgtcgggcatgtgggaaagatgcacacacagaagccgtcgaagtggccgaacatagccgccacacggcacactaactatgaaaaaataggcctcccacagaggcacaaacagtgatcttgtttctttttcaaagttttgaacggcacgattttgtttttttcttaaaaaaaaagaaaaaaaggaaaagaaaaaaaatatacactattaaaaaaaaataag

SEQ ID NO: 2752 - DNA, 759 bp, Mus musculus
  misc_feature (1)..(759): n is g, c, a or t
tacattctgcgtgagtttaaggtcacagatgcccgggatggccagtcccggaccgtccgacagttccagttcacggactggccagagcagggtgcacccaagtcaggggaaggcttcattgacttcatcggccaagtgcataagaccaaggagcagtttggccaggacggacccatctcagtgcactgcagcgccggagtgggcaggaccggagtgttcatcaccctgagcatcgtgcttgagcggatgcgctacgagggcgtggtggacattttccagacagtgaaggtgcttcggacccagaggcctgccatggtgcagacagaggacgagtaccagttctgcttccaggcggctttggaatacctgggcagttttgatcattatgcaacataagccatgggccccgcccaacacctcagccctgcgccaagtgccctggatgtgagcctaggcccgccgctgggcaggatgcggcccagggagacctcctcttcgcggagacaggcgctgccttcctcattcccttctgattccaaaacgaggttccagggtggggggttggggtggagagagaaggagccactgctccccaggctggggtcacacagggaccgacctctgcttccgcactcccctgcctgccttttggcaacattttttttcttatttttttttaatagngnatattttttttctttttctttttttctttttttttaagaaaaaacanaatcgtgccggtcaaaactttgaaaa

SEQ ID NO: 2753 - DNA, 426 bp, Mus musculus
ccagtttgaaacagtattttatttcaccatactcaaagacatgaactacatatctggggtaattataccacaaaaaagaattacattattcttaagaaaaatctagcaacaagttggggaacaaagaatgataagagaattattgggttcagtacaaccgaaaagacaccagttaaatccttcaaccaaagttaatgcagcataagtagggaccagggaggccttttccactaaatacttggggccaaacatgaccaaatgtaacagcaaatgagtttaagaggcagatgatatctggccacgaggaattttcgtcaagaaaataaaaacaaccacggagtagattatcataaagtattcgggtccaatgaaaagaacgataaaagttagatatgccatagggtacagcctgacaatttaacagcc

SEQ ID NO: 2754 - DNA, 579 bp, Mus musculus
  misc_feature (1)..(579): n is g, c, a or t
tgacatttacttcatttcagtcagttcagaaaatcacaagtaggtttccaaaagacacagcttatgtgcttttgtacaaaaaacaaagcagagctaatggcatagacagtgacaatccagccagtggtgtctgggccaatggagatccacccctacagaaagagctgatggatgccataacaaaggacaacaagctgtatttgcaggaacaagaattgaatgctcgagcccgggccctgcaagctgcatctgcttcctgttcgttccgacccaatggatttgatgacaatgacccaccaggaagctgtgggccaactggtgggggcggtggaggaggcttcaatacagttggcagactcgtattttgaccctgagagaactgaaaatgtatctggtcacaaaacatccaatactgtggctgttaaaatgtcaggctgtaacctatagcatatctatcttttatttttcttttcattagacccgaatactttaagaaaatatactcagtggnttgtttttattttcttgacaaaaattcatcatggaaaaaaaaaatctacctcttaaactcatttgcag

SEQ ID NO: 2755 - DNA, 679 bp, Mus musculus
aaccgtagcacatcctgctttaataccccaaatatctgtgcagatgggagatgcaaaataacacagaggtctgaaggcaagcacatctcactcagagagaaggcaccaggaaccgtattctgttggattacatgtaaacacacatggtggagactttcacagtgaagcaggaactttgatatcattttacaggcacactccatggacaggagatggccttgttgctgaccctccacctccaaatctttacagtgtagtgtactgtacctgatgtagggagacaagggctcacacagcagcaatttaatagggcaagagaaggaacagacacaggtgcaggccctcgggtctgctttccctctcccccacacagtggcagtgcctcacaaatggctgtttatcaaagtgggaagtaaaaaatcaagaccgagtcctaaaaggcccaggcaaatacactgtctctgtccgtgctcttcaatcaggtggcgtggatagtcctgggggagggacgtgccacatctggccatctttctaggtgatgacagtgggcgcagtgcgacccgtcctctcctggagctgggacactttcagagcaatggagatcaggggcgccagatcacctgggggtcctggttgatcttggcaacgtccttctcgtagctatcaatatacagccgga

SEQ ID NO: 2756 - DNA, 573 bp, Mus musculus
ggaccggttcggaccatatccgagagaaagatggactgtgggccgtcctggcctggctctccattctggccacccgcaaacagagcgtggaggacatcctcaaagaccactggcagaagtttggtcggaacttctttaccaggtatgactacgaggaggtggaagctgagggtgcaaacaaaatgatgaaggacctggaggccctgatgctggaccgctcctttgtggggaagcagttctcagcaaacgataaagtctacactgtggagaaagcggataactttgaatatagtgacccagtagatggaagcatttcaaaaaatcagggcttgcggcttatttttgcagatggttctcgtatcatcttcagactgagtggcaccgggagtgcaggggctgccatccggctgtatattgatagctacgagaaggacgttgccaagatcaaccaggacccccaggtgatgctggcgcccctgatctccattgctctgaaagtgtcccagctccaggagaggacgggtcgcactgcgcccactgtcatcacctagaaagatggccagatgtggcacg

SEQ ID NO: 2757 - DNA, 818 bp, Mus musculus
catggcatttttttttttatttttaaaaataattctcagtaaacagttttagcaaatatctacatatatataaatttcctagatttagcaactgcaatgtttataggacattagatattaatgataagcccacacaggctagttttaaggtagataacaaaggttaattgttttgaagaaagatctccagttaagttgcacacctttgggccagatgtgaagctcgccccggtaatcccagcactcaggatgctgaggcaggattgctgggagttcaaggccaaatgggagaaagaataagtgctgagccagcctaggctacaaacagagtgagagactattactaaaagaaaaaagagttttacaatttatcaacaataagttaatatggaacacggcttaaacaccaaaacaaaatccaactctttaggagtcaagtttcttataggcttcttcaatgaatgctgacacattcttcactggggctgaatcatgaagaacatccaagtccttcagaagagcattctggtttggaattagtgccaaaatttcttcttgaagtatgggtgctttaagacttttctgagaaagttctggaagagcaagtactttattgctatctatgtgaaatacctgtttcacctcctgttcctcttcttctacttcacttgtcaaaatttgaattttattctttaggctttgaatactctcagtcattgactctgtggtctctacgattttgtctatttcttcctgcagtgaagccaggctctcttcatttgctctttctggggcgtttccattgcagcattttgaca

SEQ ID NO: 2758 - DNA, 608 bp, Mus musculus
ctccgtcttttccggttgtttgggcggattaagtcagaagcgcgccttttgaatccgtgaagcaactgtgaagagtcgaggaagcgataaagcggctgacagatccaggggataatttgagcctcacgcgtttgtgactatgtatcgttgtgattatactgtttagatgaaaatgtctggtaaagcacgtgcttctaggaaaaaacctcaacaggtgaaaagaagcttgaaacaaagagccaataaggaagcggatttgccagagaatgaggttggaaacacagcaaaaagaaacagaagtcatgcaaagcatctgtcctctaaagtaacaggacaagcaacgtatgtccatctaaaacgggtaaaaatatcatccagcaagagaacaacctggcaacctcttccaaaggatactgaagagtatttgcaaagtatgatggagtcagtcattcttggaattttattcaacataaaaagaaaagaagaaattcagtgtcatctcaaccagttgaagaaaagactactacaacaatgtgcaacactgaaagtccctccaagaaagttgaactatttaaaggatgtgtcaaaaatgctgaaaatggaaaagg

SEQ ID NO: 2759 - DNA, 671 bp, Mus musculus
agttatgtacacttgttttattcataatttgtcatgtttggggttaccaaagtaattctaatgatgggtgaatataacaaaaaaaaatcttttacctcatcttaaaacagccactgatccatctcattcagtacaatagtcaatgttaaaaggaacataaaacaaacatgcacaccatggcacggttttcataaacgtctatttcatcattggtgggtagcacatttaacagttaaatacatttaaataatgtatagggggccgcaccacggcagcactgataaccatccaactaggaaccagccaacagtgactgtctaaatatttaaaatacagctcttgcttcatcatcctttgatgtgatcaccttctgggggaaggaaggggagcctgctggtcgcatggaaatatattaaggccaaatcttctgatattcgttcccagaggtttcttttaactggattaagcctccaattccaaggcaagcccaagtttgtggcctccagcattaaagctcttcccgtctaccagagcagacagtgtaagcttcacaccaggcctcagagtctgagtatagcccactccaattatactagagttgttgacctttgcagagatagaagcagtaggatccaactggtagttagctgcaatgccaaaacgagtgcagt

SEQ ID NO: 2760 - DNA, 601 bp, Mus musculus
gcggagtggcctcagctgcgagccgagcggtggcggcagcgcccctcaggacacccgcagatcaccttttccccgcgacttcgccatggctgagtgctgtgtaccggtatacccacggccgatgtgtatccctccaccctatgctgacctcggcaaagctgccagagacattttcaacaaaggatttggctttgggctggtgaagctggatgtgaagacgaagtcatgcagcggcgtggaattttcaacatctggctcatctaatacagacactggtaaagttagcgggaccttggagaccaagtacaaatggtgtgagtatggtctgactttcacagagaagtggaacaccgataacactctggggacagagattgcaattgaagaccagatttgtcaaggtttgaaactgacttttgacaccaccttttcaccgaacacaggaaagaaaagtggtaaaatcaagtctgcttacaagagggagtgtataaacctcggctgtgatgttgactttgattttgctggacctgccatccatgggtcagctgtctttggttacgagggctggcttgctgggtaccaaatgacctttgacagtgcc

SEQ ID NO: 2761 - DNA, 617 bp, Mus musculus
gcaaataggacactgagcttattttaattttcaagtgaaattaattcccataccttaattaagtgcataatttgatagtaaatcagtatgactgcaaagttgtccaactgtgtccattgcccaattccacaacattttcaaaacctcccccaagaggagccccacatccacgagtggtccttccccattcccctcccccgggtcccagccaaacactgatcgatgtggggccggcgtccttcactgatcgttctgtttttgaggatccctgtggccccgggatcagcccatcactcctttttatggccagtcagtggttttgaatatgccttatggagactcctaaggcttcttggctataactcatcagagaggtgggaccgagggatgaaatgggctgcactctgggcccagccaccgtctctgctttaagtagaaaagctctggctggactactttattggttgacacttcttgtaacacttcactgggaactcaggctgaaatcagattttgccctccactggctagatgtcacggagctgcaggacagggctgggcctccaagatggccaatctcaggaattcttctcgggaaccttgatggtgacagtctt

SEQ ID NO: 2762 - DNA, 570 bp, Mus musculus
gattcggagcctgagccccagaccaccgcaggtcctcaggatgctgactgcccgactcttgctgccccggctcctctgcctccagggcaggactacctcttactctacagcagctgctctcccgaacccaatcccaaacccagagatttgctacaacaagctgttcatcaacaacgagtggcatgatgcggtcagcaaaaagaccttccccacagtgaaccccactacaggtgaggtcattgggcatgtggccgaaggtgaccgggcagatgtggatctggctgtaaaagcagcccgagaagccttccgcctggggtccccatggcgcaggatggatgcctcagagcggggccggctgctgaaccgcctagctgatcttgtggaacgagatcgagtgtacttggcctcactggagacgctagataacgggaaacctttccaggagtcttatgtcttggatctggatgaagtcatcaaggtgtaccgttacttcgctggctgggctgacaagtggcatggtaagaccatccctatggatggtgagcatttctgcttcacccgacatgagcc

SEQ ID NO: 2763 - DNA, 660 bp, Mus musculus
aaaatcattttattaggaataattccaaatgggttatgaagaaaacttattcattgaatttgatgagttttcaaaaaattcttaatgaagatatgttcatcaataaacagtaaaataccagtagaactatcatatactgggcaaagagtcaggctgattccaaaagcaacatgcaacataaaaaagataacaatataaaggaagacaatctgctgagtattaaaagttatctcaatatgaactctttgcaaccagcacagaattggctatcaaatccaaaccacatcaaagtttggctgatagaagccaggagtcaataatgtgagggtggtggggtggggggatcctcagtacaagaaaactgaatagtgttttggaccacggccttggcctgtacaagcattattagaaaaatctttttggcaaagggtagaaataaatacaaatggaatgctacatttttaaatcagcagactgtctgaggaatgataaaggtctcagtaaagtatcaagggaataactttaaaacattattgttttgggctcaaaaaccactcagatctgtctaaaggtgtcaggatagctctgtatccaggcatttaggttcaagggaagcataataatggatacttttctttcccaaggagaatttctcttaaa

SEQ ID NO: 2764 - DNA, 608 bp, Mus musculus
caagctaggtctgcagtctctccgaaacagaacatggtatgtccaagccacttgtgctacacaaggaactggtctgtatgagggactggattggctgtcaaatgaactttcaaaacgttaaatgaagctggatatctaaccaaggacatgtttgatagaattggtctaggcttgttacaacaaaattagtttgcatcttggttattaaaggatatctgagacaggtttgggcagaaattacagcgtttaaaacttgttttgttgccaattattgtttaccaagaacaatgttgctatttagcaatatgcttgggtttaagagaaattctccttgggaaagaaaagtatccattattatgcttcccttgaacctaaatgcctggatacagagctatcctgacacctttagacagatctgagtggtttttgagcccaaaacaataatgttttaaagttattcccttgatactttactgagacctttatcattcctcagacagtctgctgatttaaaaatgtagcattccatttgtatttatttctaccctttgccaaaaagatttttctaataatgcttgtacaggccaaggccgtggtccaaaacacta

SEQ ID NO: 2765 - DNA, 688 bp, Mus musculus
attaaaaaaaaatcattgtttattaaaaccatttcattgcccaaggcgcttcagtagccttcacaaaatacaggtttggtgtttgttttgtattgtaagtgggtgaagcatgtgctttcggagcaccatggcaacataatcagaagagaagacaatcacactgaacacaaaacacccaccgatgtgacacgactgcagccagctactctgagagactgtgacacaatttacatttctttcttgtaattttcctcatgattatacatcgtaaaaggaagaagcatagtgttattatttttggcactcagagcagctctagtggctaagattgggaaggccttgtatggtggtaactgcacaccagccagggtgaccctgggctggggaacacaggcagttcccaagcttctgctaagggacaaatagcttgagacataaacagcagatgacaaacaaacaaactccccatgacagtgctgggagagggaagggacactctgttatccatacatttccttcaagacacagataagtggctggcagcagaattttgatttacacagcagtggaagacaagccttggcctcaacagtagatttctcacagggcctggacaagcccaggaccctgaccacacacacggtacctggctgtgggactgagcagtcacagtcaacacattgtctgc

SEQ ID NO: 2766 - DNA, 584 bp, Mus musculus
ggctctctggtggttcatccctgagtccccacgatggctcatctctcaaggccgaattaaagaggcagaggtgatcatccgcaaagctgccaaaatcaatgggattgttgcaccttccactatcttcgatccaagtgagttacaagacttaaattctacgaagcctcagttgcaccacatttatgatctgatccgaacacggaatatcagggtcatcaccatcatgtctataatcctgtggctgaccatatcagtgggctattttggactatctcttgacactcctaacttgcatggggacatctatgtgaactgcttcctactggcggctgttgaagtcccagcctatgtgctggcctggctgttgttgcagtacttgccccggcgatattctatctcggctgcccttttcctgggtggcagtgtccttctcttcatgcagctggtgccttcagaattgttttacttgtccactgccctggtgatggtggggaagtttggaatcacctctgcctactccatggtctatgtgtacacagctgagctgtaccccactgtggtcagaaacatgggtgtgggggtca

SEQ ID NO: 2767 - DNA, 480 bp, Mus musculus
attatttatgttttgtttcgttttttattgtttctcctttttatcaaaacttgtcacagttgggaacccagaggaagtaaaaaaaattcccacaaatagttctcctggttcctgagtcctccctcaacccgcttaccagggcttgaagccacccctgggtacacatgatcgtctccccccaccctcagtcttcttcccagcaataaatacaggtgaccgtgattcagtgaaaccacaactcatgtctctatcttgagtgtcccaaggggaccagaggggcaaaagaagtttaataaccttgccctcctaattgtgtggaagcgtctccctctaagatgggagaaatgcagcagctctggaaagaaacaggaagacaaggttgagatgagaaggaagaggacgttctccaggaacctcaatcttgatccatttgtcccttaccaagtaaggggtggtcccagtgtatcagtgggacagaga

SEQ ID NO: 2768 - DNA, 587 bp, Mus musculus
cggcagtggcggcgcgtaggaggcggtcttggttaagtttggtgctggcatacttaggggtctgtctggggattacacttgctgtggatagaagcaactttaagacctgtgatgagagttccttttgcaaacggcagcgaagcattcggccaggcctctctccttaccgtgccttgctggacactctgcagcttggtcctgatgctcttacagtccatctgatccatgaagtcaccaaggtgctgcttgtgctggagctccagggccttcagaagaacatgactcggatcaggatcgatgagctagagccccggcggcctcgataccgagtgccagatgttttagtggctgacccccccacagctaggctttcagtctctggccgtgatgacaacagtgtggagctaacagtggctgagggaccctacaaaatcattttgacagcacagccattccgccttgacctgctagaagatcgaagcctcctgctcagtgtcaatgcccgaggacttatggcctttgagcaccagagggcccccagggtcccgcaagaatcaaaagacccagctgaaggcaatggagcccag

SEQ ID NO: 2769 - DNA, 765 bp, Mus musculus
ccaaatgcagaaatatttattttggtttccttcattgtttttggaaattctgttctggtttataaaacatagaaatagccaacactgaaagcaaacattcaaaaccccgttgtgacaaattagcgacttcctgtgcaattaagaatacgagtatgaagttaggctaccaaatagtgttattacaatgatgattctttagtgcaaacccagttgtgcttcaataacacacgcactgtcacacagccaacaacagtggcttcaaatgtataaacaacagcttggataggtcggatgtggcaaagacttgcagtaaagtgaaatgctgttaatttcccaaattaacttaaaaaatatatataccttgggaagtgaatcccagggtatgattttattcccctcagatttcttcatcccagatttttggcttgtcaaatgcatttcacataaatcaggtagttgtataataaggatatttacttgttactgtccattttaataagtacccatgtatatcagctccctacatagttttgaagacatgctttgcctgagtttaactgggaggggaaaaaaagcaaggtaatcaccgcattatcatttgccaggaaaaccacgagggagcccagtggccgttaccaacatgggctgcttccacgagggagcccagtggccattaccaacatgggctgcttcacgagggagcaggtggagagcggtggagatgtcacagttgagcatggcggctccagggcgttctttgaaata

SEQ ID NO: 2770 - DNA, 562 bp, Mus musculus
caacactgaaggcgaagaggccagagctacggaactatttcaggtcgcagatagatgaactgtacgccaccatcaagatctaacgtgaggaaggatacttagaagaaatggcgcatctccacaatcctcctcgtaccaatggccttcgagttggtaactttgcctgcagcgagtgtgggaaaggaaatgccctgccgccggacttgtccacggggtcttaccatagggatagtcgagggcacggaacactgccttacttacagtcacctgtgttgcagcccatgatcccggggacacacaatttccaaaacgagccttaaacattgtaaaggggaacccataaaagtgctaagttatttaagacttcttcaaccaataaggtggatgctacaagttctgtctcctgtttttctaactgaggggttaggacttattctttctgatatgtctgctgcttgctgcgcgttttgcagctgtctgctgctctgaagagcaccgtacactggaggaaagctgtccctttaagaacaactgtccaggctgaagaaagtcacagtggacc

SEQ ID NO: 2771 - DNA, 636 bp, Mus musculus
cagaggcacaaagtccggattttattgttatcctgtgtttggcttggtgcaaaaaatgcccttaccactgccaggccccactggcctctgggaaggcacaggcagcaggtgttctgggttactcttagctgttgatttgggtctcaggcagggcttgcaaaagaagcacagtggggctcccccttaacatgaagtgcaaacagttaattcacagtcagacttcaccaggaggaagagcgggccagggcagaaggcactctgatggaggagcaagcccaaggctagccttggtctttttcctgcttcctgataatttggacagcacagctgagaagcggcactgccaggtctgggttagtgcatggtggggtagggtgggagggcctgtcactggtagaacttcttgctagagttgttagcgtggtcgaggagcagctggcatggggtaaactgtgttccataggcagactcgtacttccgtagccggtccactaccttctgagcaccatacagatccacaaagcggaagggccctccgagacaagggggaaagccaagcccaaagacagctccgatgtctccctctgccggtgtggccaggatcccttcctgtaggcacaggactgcctcgttcac

SEQ ID NO: 2772 - DNA, 590 bp, Mus musculus
gaagagctttcgtcctcttctgctcaagatggtggcgtcccgggcgattggcagtctcagtcgcttctctgccttcaggatcctacgctccagaggctgcatttgccgcagctttacaacgtcttctgctctgctgaccagaacccatattaattatggcgtcaaaggggatgtggcagttattcggattaactcacccaattcaaaggtaaatacattgaataaagaagtacagtcagagttcatagaagtcatgaacgaaatctgggccaacgaccaaatcaggagtgctgtccttatctcatcaaagcctggctgctttgtcgcaggggctgacatcaacatgctatcctcttgtacaaccccccaagaagcaacacgaatatcacaggaaggtcagagaatgtttgagaaacttgaaaagtccccaaagcccgttgtggccgccatcagtggatcctgcttgggaggaggacttgagcttgccatagcatgccaatacagaatagcaacaaaagacagaaaaacagtattaggtgtccctgaagtgttgctggggatcttaccaggagccggaggtacccagagac

SEQ ID NO: 2773 - DNA, 605 bp, Mus musculus
gatggacataccccctcccagtgggccgctctggatcctgggcgatgtcttcattggttcctactacactgtgtttgacagagacaacaatagggtcggctttgccaatgctgtcgtactctaacttgctccttctccactgtcagggaactggatcagagtccagtagaggaagccagccagccccatccctccacctgccccactcacacatagtcacactcgcttagtgttgctggacccttgggggagacctggctggagcttgtccagctgttctgttctgtggttcctcaccctgggttcagattgctgccctctgcctgtctgaaggaggccaaggcccacccagtacacgaggctgccttcaaaggcccctactggtttaatagctgctgagatggattgtcttgtcctgccgccctttgctgtgtgggcagtactctgaagcaggcaaatgggtcttaggatccctcccagaaacctgctctgacccagacccatcacccagcttggggatggcaccacgttctactgcccctccaactctggcctggcaaaggcctgaaggtgagcaggaaggagcaagaggacagaagcaaaac

SEQ ID NO: 2774 - DNA, 554 bp, Mus musculus
caaggcccaaaacaactttatttgtatttcaactttggctcccagctgcctagcccaggatgagggcagcagaggccagccaaaaccagtcagtcatcctacctctaccccaggctgaggcatgccttcccaggagggcggggtcaagccctaggtaaccccccaggttcatagttttgcttctgtcctcttgctccttcctgctcaccttcaggcctttgccagcccatagttggacgggcagtagaacgctggtgccatccccaagctgggtgatgggtctgggtcagagcaggtttctgggagggatcctaagacccatttgcctgcttcagagtactgcccacacagcaaagggcggcaggacaagacaatccatctcagcagctattaaaccagtaggggcctttgaaggcagcctcgtgtactgggtgggccttggcctccttcagacaggcagagggcagcaatctgaacccagggtgaggaaccacagaacagaacagctggacaagctccagccaggtctcccccaagggtccagcaacactaag

SEQ ID NO: 2775 - DNA, 440 bp, Mus musculus
  misc_feature (1)..(440): n is g, c, a or t
cacagtcccaggttcagttttatttcctaatacagggccaatcttttttgcattaaaaggaactgtcccaaagcttaattaaaccacacttaacaaaccagtcaattttntttgaaaagcacctccaagttcagaagggaaaactatgtccataatagaatcaaatcccaggctagttcagctcgggtcaggcccacactcagcagggctggtctccttaggttcttcacactctcctgtcaaatctacgaagctgtttcccacgatgggggaaggaacagaaatccccattgtttttcgcactccgggtatgcttacaacatcacctggagtcacttgctgggggagttctttggggttattggtcacttgttcagcagggtacatttttttgtaagaaggacccaggagacagatcatattgggaggaggcctagggc

SEQ ID NO: 2776 - DNA, 590 bp, Mus musculus
aaatggagaagcagcaactcagaaagggagcatgagcagattgagcgcgttgtccaggagtcaggaggcaagctaacacggcggctggcaaacagtcagtgtgaatttgaaagaagaaaaccagatgggacaacaatcttggggcttctccatcctgtggatcccattgtgggagagccaggctactgccctgtgagattggggatgacaactggaagactgcagtctggagtgaacactctgcaggggttcaaagaggataaaaggaacagagtaaccccagtattatacttgaattatggaccctacagttcttatgccccacattatgactctacatttgccaatattagcaaagatgattctgatttaatctactcaacatatggggaagactctgaccttccaaacaatttcagcatctctgagtttttggccacatgccaagattacccgtatgttatggcagatagtttactggatgttctaacaaaaggaggacattccaggagcctgcaggacttggacatgtcatctcctgaagatgaaggccagaccagagcattggacacagcaaaagaagcagagat

SEQ ID NO: 2777 - DNA, 496 bp, Mus musculus
  misc_feature (1)..(496): n is g, c, a or t
caagagacaaactgtccagcagaagactctgtaaaaagggttatttttactaatgttttgaatacaggaactaaatatgcgagggggggccctcaactttgcagaaaacagntagggccttttttttgtcaagggggaagcccactctctagagtactgcagaggactgtcccctcctacttaatgtcagtgccactaagcaggaaacagaaaactcagggtgtgaagaccttaccagttactagctagcgtgcaaggaaaggggaccatcctgtgtcctgggagccaggatacacaggcaggaggcagaggctcctaatttagttaaggacaggaggctgaatgcccaggttcaggaagaacaaaaagggaattttggaggtaggnttttttatngagttaaaaaacagggacattattcaatttttttttgtggccccnaagntggtggcccagccccggacacgagcccngcccctacaaaagcaaagggact

SEQ ID NO: 2778 - DNA, 596 bp, Mus musculus
gcggccgtgaagacctaccgctggcagtgcatcgaatgcaagtgctgcaacctctgcggcacgtcggagaacgatgaccagctacttttctgtgatgactgtgaccgtggctaccacatgtactgtctcactccttccatgtctgagcctcctgaaggaagttggagttgccacctgtgtctggatctgctgaaggagaaagcatccatctaccagaaccagaactcctcctgatgtgccacccagctcccctgcatctaaggccgttgctctcctctctaccttggtttccattgcccctctctcctctttcactctgtagtcctgccaacctccgttggcaacagcacagggaggtggcagctctgactgcctctagccccgagccctcagggagtaaggagcagcgtgctgctccagggctgacctgtgggtccaacttctctctgctctccaagaagtgcattcactctgcctgccttgggcctaagaccctggtgattacagggctcaaatggggtcctctgagaagaaatatgagagcagctcacttgtctcaagccttgcccacccctcttcccccaaaccccctttgg

SEQ ID NO: 2779 - DNA, 582 bp, Mus musculus
gctgcctggcatttgtgtggtctcgtcgtcagcgcagctgggcctacacacaagcaaccatgtctaagggacctgcagttggcattgatctcggcaccacctactcctgtgtgggtgtcttccagcatggaaaggtggaaattattgccaatgaccagggtaaccgcaccacgccaagctatgttgctttcacggacacagagagattaattggggatgcggccaagaatcaggttgcaatgaaccccaccaacacagtttttgatgccaaacgtctgatcgggcgtaggtttgatgatgctgttgttcagtctgatatgaagcactggcccttcatggtggtgaatgatgcaggcaggcccaaggtccaagtggaatacaaaggggagacaaaaagtttctacccagaggaagtgtcctccatggttctgacaaagatgaaggaaattgcagaagcgtacctcggaaagaccgttaccaacgctgtggtcacagtgcccgcttacttcaatgactctcagcgacaggcaacaaaagatgctggaactattgctggcctcaatgtacttcgaatcatcaatg

SEQ ID NO: 2780 - DNA, 429 bp, Mus musculus
  misc_feature (1)..(429): n is g, c a or t
cnnnnnnnnnnnnnnnnnnnnnnnggngccaannnaaanagnnnnannannccangnnacnnngnnnngggncccnggggaacaaagcnacaccnncngggacggacnaaanccaccncnncaagggnggggccngaagttttttaccagatgggggagctcctccacctgggaagccaccaggcattcccccaggcatgccacctgcactctggtacagcttggtaatgatagggttgcagactttctccagttctttctgctgatgctcaaattcttccttctctgcagtctggttcttatccagccagctgatgatttcattgcacttgtcaagaatcttntgtttgtcctcatcattgatcttgccttgaagtttntcattttccacagttgctttcatgttgaaggcataggactccagtgagt

SEQ ID NO: 2781 - DNA, 464 bp, Mus musculus
  misc_feature (1)..(464): n is g, c, a or t
nacaaatgatcacatagtcatttatttcatctaaaaatataaagtataatgactgagcagatgtttcagaagccagcttctggagccttaggagccattttgggttttttttttgagaaagattaatacttccaccatggactcgctagtctataacaaggaaagtcactacgcattagacaataaagcaattagaccaaaggatacttctaagtaacttcaaagaagttataacctaaaagttaaaaaaaaaaaaaaaaaaatcttggccaggcatggagatgtcttctgggatcctagcacttgggacacaggaggtcaggggttcaagaccagtcaggctacatagcaagttcaagaccagcctgggctacatagcaagaccccacctttaaaaaaccaaaatcaaaccaacaataanaaaatcttccacagaacttctatggtagcacaattaaaaacac

SEQ ID NO: 2782 - DNA, 592 bp, Mus musculus
caaatctgccgccatgctggccgtcttcgccctgtcggctgtggtgcacgagtatgccctcgccatctgcctgagttacttctacccggtgctcttcgtgctcttcatgttctttggaatggcttttaacttcattgttaacgacagtcggaaaaggccaatctggaacatcatggtttgggcttctctgttcctgggctatggactcattctgtgcttttattctcaagagtggtatgcccgccagcactgtcctctgaagaaccctacatttctggattatgtccggccgcggacctggacttgtcggtacgtgttttagaagccctggctctgcctccttgcttgccattgaagattggatattcttcctgattccgagccagccgtcttcagcggttactgaatccccacactgcggtgtttggggctctctatcctttctgatgattcacctggagttgggctgtgggaagcccacttcgtgatttttttgttttgttttgttttgttccctttgggggagaaaggagactgacagttgagataatggcagatttttgcagggttatctcaggtcaagccttggtag

SEQ ID NO: 2783 - DNA, 597 bp, Mus musculus
cttatcaaaaactcacattgatttattagaatatgaaaaaggttcagtttcctttgtacaggcggcagagcggcagcagctgcggtggctttgtacatggttgtcgatgtcaccctgcctggcaactcctgcccaaaacagcacttgcatggagaggagacagctgggccatgcacccatggccccatcccctgggagggaccctctgactattattgcacgatcctggggagggagtgcccaggggttgggcagatacccatgggcttggccccagccatggtggcggtagggagtgtgtgcctgtgagcaaaggcctctagggggtccagtactttctactctacagaatgcaggaaagagagtggtccagataaggggtggtggtagaactggccaacagaagtaaaagcaggcccaagagcaaaggaggtaccaggaggccccctgctggtgagcttgagtcatgacaggttgggccacatcagaatcggtgctgtgggcaagggcccccagcagcagaggttccatttaagggacggtgttagacaccgaggaaggacgagggggaaagggcagagctctgactggcatggg

SEQ ID NO: 2784 - DNA, 541 bp, Mus musculus
gccgtgaagaaaaagcaagaaacaaagcgctccatcaacgaggagatccacacacagttcctggaccaccttctgacaggcatcgaggacatctgtggtcattatggccaccatcactggaaggacaagctcaaccgttttaataagaagtatgtgaagaagtgcctgatagcaggagagcgctccaaagagccccagctcattgccttctaccacaagatggagatgaagcaggccattgagctggtggagagcggaggcatgggcaagatcccatctgctgtctccactgtctctatgcagaacatccaccccaaggctgtgacttcagaccgcatcttgccagcactgtccaaggacaaggaggaagagatccgcaaaatcttgaggagcaatctgcagaaaacccggcaacggctgcggtcctataacagacacacgctggtggccgacccctacgaggaagcctggaaccagatgctgctccggaggcagaaggcccggcagctggagcagaagatcaccaactacctgacagtac

SEQ ID NO: 2785 - DNA, 307 bp, Mus musculus
  misc_feature (1)..(307): n is g, c, a or t
gggnttggaaaactaggttttatttaaaccaggggtattatctgacatcctatggcataccagattacagccaagttcacaaatacaaacgaacagcagtttgggggggcccttgtcttctgaggaaaaaactgggggggggcagaattgggctggggatgccaaaacttttttgccagttttagtttggagtccagtccctggaacacagcccctaacacagaagggccacatgggcaaagatgttttcaaggaaataaccagagcagaattgggggaaataacactgggcattaaaaaacagaca

SEQ ID NO: 2786 - DNA, 598 bp, Mus musculus
agtcatcaaggccccgctcctctcctcggaagggtcccccaccccccggcagcttgacactgaatccagtgtcaatttggggagaaagcagttttgtcttggaattttgtatgttgtaggaatccttagagagtgtggttccttctgatggggagaaagggcaaattattttaatattttgtattttcacctttataaacatgaatcctcaggggtgaagaactgtttgcataattttctgaattttgagcactttgtgctatataaggacccatatttaagctttgtgtgcagtaagaaagtgtaaagccaattccagtgttggacgtgacaggtcttgtgtttaggtcaaggtgtctcctctcagtgcagggacatgcctgctctgtggggcaggcgaggaccctgaatcatttggagcccagaaggaggcagactggccaggtctcaccacctcagtgtgcagttcaactccatgccatcccatcaagatgggttagtagcagtgtctgtttttgaatgccaagtgtgatttccaacaattctgctctggttatttcattgaagacatctttgcacatgtgaccatgctgtgtta

SEQ ID NO: 2787 - DNA, 522 bp, Mus musculus
aggaggcgggattaatgttttattaatggtcagctatattcgttcacacatgcatttctaagatttatatccaaacagcatatggtatttacatgcaatggacagattagaaaaccaaattcgaaccttggctgcggtaagactatgttttgttccacattaaatacatagtagtcttacctcctcctttgaacacttacagggaaagcccactcttctgccttggaaggagtaaaaaattgcattggtaactgctcaggagcagcaaggaaggacactggagacctgagagaggaatgtcacacttgggtactagcaggaatactccgagtaacagaggttagcaagtagtcctaagagcgcggtcaggcggctttgacttacaggtggctctgctatatatttatggtgccttttgttttcttggttttaggaggaaaaaaactttggcccttgtaggtgggattcttttttttgtattcatggatacttataaaacacgcatgagctgttcagccagca

SEQ ID NO: 2788 - DNA, 585 bp, Mus musculus
acaagccatgatggacattatcaccttgtttggcctcaccgccaattccaaaaagtaactgtcgaagccgcacggaaggaaaatggactctagtgatacaaaccaaatgaataggtgttgctcctgaccataggacaggcagaaaattgttcttataaaactcagttttccttccagaaggtttaccgtcggtctccctagaacaaccgtaggctccaccgtttgacttgtgaccctactacatccagagatgccttggctccaggaatattgggcacagtcccccgaagtcttttgaatcggctcctaatggataaagggatttaaatgctggtgaatccctggattttgggggttgtatcaatatgtgttggaggtgacagacttcctcagtggtgaccctgtggatacttgggacttgacttcacccaggcagtgagagcatcaccttgtggaaagagaaagtggcttcagagccagtggaggtaacagctctagctaacacacctgtaacacactaatggaatggttaggcctggggattaaggttctgctatgaatgacagccaccatcgctttgggagt

SEQ ID NO: 2789 - DNA, 706 bp, Mus musculus
gcatttcttggttttatttgaaacagtgcatattttaagcattttatggaaggattttacacttgtcatttacacaaattacaaggttcggcttaaagtctttaaaaaaattctaaaaatccagcccatgtgcagcacaagaatatgcaaaactactttacagtatacacactttttatcaaaggagatacaaaattctggcttgtagttttagacaaatacaagaagcttcaaactagacacaaagggttaacattaattctcaattttaagtctgcacttttgtgttgtatttctctgagatgtaaataccaaattcctaagagattttaacattttctttttcaaagaaaacctgacacatttccagtaaacaagtccctctcaatttgcttaatccccaaccagtttactcttggtgccagagaccaggcactcatgaggaacagaccctgacagtaactgtttcaatgcaaaactccaaagagctgtaacagatgtgaacgcttctgctgtattctgaccagtgcccttaacatttaggaaccttcttccttacactgtgtgactaactgctcaacatagagttcactgggttccagcaaagaagttttggtagtgacaaactggtggccctaagtcaaacttgtaaatagaatatagcactgactgaatgagggacctgactgacggtatgcatagatgc

SEQ ID NO: 2790 - DNA, 595 bp, Mus musculus
gataagtgagagttggctataaattgattctgggtgaaaggtgggcttcttttaagtattttacatgtacatgtttaggtgtcagaagatggctagagaacagtgaataccaatgatagaaacaatatttcttgaaagggcgtaaaagccctgctcttcctgttgcctccaatctgctgacagagcatctatgcataccgtcagtcaggtccctcattcagtcagtgctatattctatttacaagtttgacttagggccaccagtttgtcactaccaaaacttctttgctggaacccagtgaactctatgttgagcagttagtcacacagtgtaaggaagaaggttcctaaatgttaagggcactggtcagaatacagcagaagcgttcacatctgttacagctctttggagttttgcattgaaacagttactgtcagggtctgttcctcatgagtgcctggtctctggcaccaagagtaaactggttggggattaagcaaattgagagggacttgtttactggaaatgtgtcaggttttctttgaaaaagaaaatgttaaaatctcttaggaatttggtatttacatctcagag

SEQ ID NO: 2791 - DNA, 570 bp, Mus musculus
  misc_feature (1)..(570): n is g, c, a or t
gactgggacaaataccaagtttatttcacaaacactaggaagatgggctggatgggggttgaggggggcacaggtgcacagctgtacacagtcaccatcagcagcccactccccacactggggttcagtctggactgcaatgcctccagagtcaacaggcagcaagaggtgagtgcaggggagaccctgaacaccaagccccagaaaggctgagggacacagctccagctgtcccaggaaaaccagcaataaataacagtagggcacggccccacccatacaggtcatctagtcacccatcttcactctggaggtctgaaggattgcaacaatgaccccaaagaggccaatggcactgccaaagatctccacgatgagaatttttacaaagaggctggggttctgtgcatccgccagggcggccccactgcccacgatgcccacgcagactccacagaacaggttggacagaccgactgtgaggccagccccaaacatggagtaacctgcatggtagtttcgatggccaatggccttgggctccgtagcactgaaaggcggatagtcgan

SEQ ID NO: 2792 - DNA, 579 bp, Mus musculus
cctttcagtgctacggagcccaaggccattggccatcgaaactaccatgcaggttactccatgtttggggctggcctcacagtcggtctgtccaacctgttctgtggagtctgcgtgggcatcgtgggcagtggggccgccctggcggatgcacagaaccccagcctctttgtaaaaattctcatcgtggagatctttggcagtgccattggcctctttggggtcattgttgcaatccttcagacctccagagtgaagatgggtgactagatgacctgtatgggtggggccgtgccctactgttatttattgctggttttcctgggacagctggagctgtgtccctcagcctttctggggcttggtgttcagggtctcccctgcactcacctcttgctgcctgttgactctggaggcattgcagtccagactgaaccccagtgtggggagtgggctgctgatggtgactgtgtacagctgtgcacctgtgcccccctcaacccccatccagcccatcttcctagtgtttgtgaaataaacttggtatttgtcccagtcaaaaaaaaaaaaaaaaaaaag

SEQ ID NO: 2793 - DNA, 341 bp, Mus musculus
aaaaaccccccgggccttttaaaaaggaaaaaaaaggcaaaccagggcgggggggaaaaaaaaacccccgcaggggggggggcggcccccccctttttcagccccccgtttttccccccaaaagggaaaccccaggggccggggaggccccccccacccggggggcggggctagccccccccccggggaacaaacctaggggagggggaaaagacctttaaaatccccccttcagggcgggaaccccgcggggggaaaaaccaaaagaaaccgggggccccggggggggggggggggggcaaaacaaaaaaggcccccggggccccccggggggggaaaag

SEQ ID NO: 2794 - DNA, 602 bp, Mus musculus
tgcattagcagaaatgcatccaatatttttagcccacggtcctgccttcagaaagaatttcacaaaagaagccatgaactccacagatctgtactcactgctctgccacctcctcaatctcaccgccctgccacacaatggatcattctggaatgtccgggaccttctcagttcagcaactcccaagccaattccttacacacagagtaccacactcctccttgggagtgacaaaccaggggaggatgagcaagaggaatcgtacccttattacataggtgtctctcttggcagcatcatagctatggtattctttgtagttctcattaagcatttaatacgcagtcaagtgcatactttacaatataggcaggtcgaagttgctcaaccgttactccaagcttagtgcttctttgacatggaatggcagatcaaagtggagggtccgaaattctatcagcggtgacccttcagcttctcacaagctagtcacagatatctgcataggccatcaagcagtttacccatacgcgggcccagtcacaggtacatacacgcacaccgacagatcgaaacactccctgcctgcaaatgatcaaaga

SEQ ID NO: 2795 - DNA, 595 bp, Mus musculus
attttaatgtttatttttattctatatatccagctcttgaagaaaatgacttatggattagacatagtccttcatgattatacctcttcaatacctcagaacacacaaggacactgtgagttaatgactacaatttaaaaaaaaaaaaagggaaattcagcataattcacaaaaattcaagaggaaattttaggaccttgatcagaagcttccattaagtgctggtgctatgtgctacttcatttcaccaagtactggcactatgtgctacttcactgtagaccaaggttcagggcaggctaagggaaagaatgcttaccctctaaggacatgatccaagaaatgggggccaagcactcggggagaattggttagccatcaagaagtccctagtaagagcagctatggaagcagctagccacctttagagagcctgaacctgtcttaaaattacaaagcctgtggagcagtacttataaacacaaacataatgaggttttgccattctataaataatcttcaaggcattggaaggattccagctggggctcttttttggcctgaaaagcttcaggtaattgcagacataggatgg

SEQ ID NO: 2796 - DNA, 603 bp, Mus musculus
gcagctgcgggaaggttgctctggtcctcggttgctcgtcatgcaagtgctatttcccggagtatttctgcctcaacagttcttaggcctgttgcttctagaagaacctgtttgacagacatactgtggtctgcctctgcccaaggaaagtcagcctttagcaccagttcctctttccacacccttgctgtcacccagcacgcgccctattttaaaggtactgctgttgtcaatggagagttcaaagagctgagtctcgacgactttaagggaaaatacttggtgcttttcttctaccctttggatttcacatttgtgtgtcctacagaaattgttgctttcagtgacaaagccaatgaatttcatgatgtaaactgtgaagtagttgcagtttcagtggattcccacttcagtcatcttgcctggatcaacacaccaagatagaatggtggtttgggccacatgaacatcacactgttgtcggatataactaagcagatatcccgagactacggagtgctgttggaaagtgctggcattgcactcagaggtctcttcattattgaccctaatggtgtcgtcaagcacctgagtgtcaacgac

SEQ ID NO: 2797 - DNA, 585 bp, Mus musculus
ctgatagtaatcttaaaggatgacaaaactttattatgttttttatttcagaattagaaaatgtcaaaaaataattgtttgaaaccacaaaaaattaaaaaggaatataataattgattcatcaaaaggcattctagctgctgttagcataatttctttcttcagattatgaatttctatgatttcagctgaatactttcaacagtttccttaagatatgattttgacttattttttcttcagtatttctgtcatttcaggaaccaccttaaataaatctgcaactattccataatctgccacctggaaaattggagcttctggatctttgttaatagccacgattgtcttgctgtccttcatcccagctaaatgttgaatggctccagatattcctacagcaatataaagttctggagctactatttttcctgtctgaccaacttgcatgtcattgggaacaaagccagcatcaacagcagctcgggaagcaccaactgcagcatgtagttgatctgccaggtcatacagcagtttaaagttctctccactcttcaaaccccgaccaccagataccaccacttt

SEQ ID NO: 2798 - DNA, 571 bp, Mus musculus
gcggcggtggcggcggcggtggttcccgcgcgctccgggtctctgaggctgagggtactgcggggctgactagaacagagacaatgtttcgagcagcggcgcctgggcagctccggcgggcggtctcattgctccgttttcagagtaccttggtaatagctgagcatgcaaatgattccctagcacccattactctaaatactatcactgcagctggacgtcttggaggtgaagtgtcctgcttagtagctggaaccaagtgtgacaaggtggtacaggatctatgtaaagtagctggcgtagcaaaggttctggtggctcagcatgatgcatacaaaggccttcttccagaggaactcacaccattgattttggaaactcagaagcagttcagttacacacacatctgtgctggagcgtctgcttttggaaagaaccttctgcccagagtagctgccaaacttaatgttgctccagtttctgacatcattgagatcaagtcacctgacacatttgtgagaactatctatgcaggaaatgcgttgtgtacagtaaagtgtgatgagaaagt

SEQ ID NO: 2799 - DNA, 607 bp, Mus musculus
ggggtccagggaatttatttacaagaatagaagggcccggctctccctggggacttgccgggctatatacagattcagatgaccacagtcacttaaattacaagaagatgggggtggtcctagggtctggtgagggccacaggtctcagtctatcgggtggaagcctctgcagggatcaaggctgatgcatggccacctgcagacgaatgcccagatcacttcctcttgagagaacctttgttcttctccttgtctgccgaccgctgcttctttactttctcttccttcttgctcttgctatgcacgttttcgtacacctcctccttgtgcttggaggaagtacgcgaggctttggcgtgggcactcctcacagcgggagggtacgtgatattcccatactccgactcctggcccttctgggattgtatgatctccagtttcttcttggtcgtttcgatgaactgggcaatggccacgtaaataaacttgtactgggcctcggtctgcaccatgccggagcgctgtgctcgtaccatctggatggtcttctggatatcaatgtcacagtctagccccttggtggagatgctttccataagcatatca

SEQ ID NO: 2800 - DNA, 545 bp, Mus musculus
gatccctgaacagctgtgccactcgattggccccgcccccgtcgccctttgcctgtgacttctccccactcctcccgggagatgttgtcccgcgggtggtttcaccgggacctcagcgggcctgatgcagagaccctgctgaagggccggggagtccctgggagcttcctggctcggcccagccgcaagaaccagggtgacttctccctctcagtcagggtggatgatcaggtgactcatattcggatccagaactcaggggacttctatgacctgtacggaggggagaagtttgcgacgctgacagagctggtcgagtattacacgcagcagcagggcatcctgcaggaccgagatggcaccatcatccaccttaagtacccactgaactgctcggaccccaccagtgagaggtggtaccacggccacatatctggagggcaggcggagtcactgctgcaggccaagggcgagccctggacatttcttgtgcgtgagagtctcagccaacctggtgattttgtgctctctgtgctcaatgacca

SEQ ID NO: 2801 - DNA, 581 bp, Mus musculus
ggaaaaggtagacttttaataactgcttttatcaccaagttaatcatgcagttacaaagtagttagaaatttctgaaagggtactgttaaaaaaaagcgttcatccttatataaataatggctggtacttctgggggacattcctgttcaaaagccctggccaataaccccccaaacaaaagtcaagcccaggcaggcagtctctagcctgctgctggtgaagcggtgagcaaaatgcaaagccttggaaggggacacacaggttgagcctggccactggctcgtgctcgaagcctgccagactccaaacagggagcccaagtctttttttctgggacactcgatttgaattatggttcaattactcaacagaatagaccttcaaatgggaagaacaagtagttttcatggtaaaggggttactggactctctggactgcattaccagttcccaagagtcccttgtcccttgcaggtctgaggagagcgccccatagggctactttatttctgctggacaatgatgcagggccaataagctacaagtgatactgttttatagtataaaaaactagcttctt

SEQ ID NO: 2802 - DNA, 558 bp, Mus musculus
gtatatggaatccggatgggattgacccaaaagaactggaagacttcaagttgcaacatggatcaattctgggcttccccaaagccaaggtctatgaaggaagcatcttggaggctgactgtgacattctgattcctgccgccagcgagaagcagttgaccaaatccaatgcacccagagtcaaagccaagatcattgctgaaggtgccaatgggccaaccactccagaggctgataagattttcctggaaagaaacatcatggttattcccgatctctacttaaatgctggaggagtaacagtgtcttactttgagtggctaaagaatctaaatcatgtcagctacggccgattgaccttcaaatatgaaagggactctaactaccacttgctcatgtctgttcaagagagtttagagagaaagtttggaaagcatggtggaactattcctgtggtccccacagcagagttccaggacaggatatcgggtgcatctgagaaagacattgtgcactctggcttggcctacacaatggagagatctgccaggcaaatta

SEQ ID NO: 2803 - DNA, 444 bp, Mus musculus
ccttaaacatttatattttatagaactttactctgctactaacaaagtcatacaaagacaaaagtctataaaaaggaaaaaacatgaaactgatctgaacggccacagttaccattaacatggagattgcaacagaaaggaggctggatgcccttgacaggcatctcttgtaagcagcgacccggaacctgcaaaggccagctgcccagggcattcctaacagctgggagaggcgaggcgagccacctgctctgctctagacatccagggctcaggagtctgagccaagttcagaattgaggcaaaagcaggtgtggaaatcactatgctgacagggacacacactgggcagcagtcactctggcgagcttacctgggtgcctaacaaagcctgaagaacctgtgcaggtgcaaacgtggcctctaccctaactggaacgtcgt

SEQ ID NO: 2804 - DNA, 603 bp, Mus musculus
catgttgcagtgattctggtcaccctgacacacacggcttcccacagacataacagctcctaggcttcctccaaacagaagatgctatatggcggggagtatctagagctgttctggtaggaacggctcctcacattgttgtcggcaatggtaggtatacccaggagatctggggcagctcttcctattactggcagggcctcgcctcctgacactaggatcacctttctgcagatggctgtccagcattttgtggcagttatattttacttccaccagagaacagtacaaaggcgcctctgtacttttcatgaacctgacagataaaccagaactcgtgaacaagcacacagttccttgggtctagaatgtcactgagttgttccccattggcttctttgttcctttgagtatccttgctgtgctttctgtacagtaagcacactgaggactgtccaccctcacctcctcattctctcccccaccctcctcagacatggctcagggtaccactggaaagtgagatagtgtttacagggtaggagtgggtcaccattggaaccagtggtacctgacagctgtgttcccatctgagtcgatgcc

SEQ ID NO: 2805 - DNA, 482 bp, Mus musculus
cttctctctttttaattgccacatattattttagaacaagatacaaaatttagaaactttaagaaacaagcataaactataatagcccagagtctgagaataagctgtaacaaatggctgctctgccgggctggggggaaagatctgcatccctgcaggtcagcggctcccctttctttcatctccctcttcacaggggagctctggtccacagcagcatgagcctgtggcgctgattgtgtcagggagagacaccctggattcacagagggaggccgttcaccacagagcagatcctatgaggctgctgggtctagtccctatttactgctgtgggtgggattttaagcagatgctgtttgggtagcagctcggctcgccttctttccccggggaattgttgcatggatctccattagacgggacaccgggcatacttcctgcgatgcatctcatccactcgttcaagggaccaagtacct

SEQ ID NO: 2806 - DNA, 581 bp, Mus musculus
gctccagcgaggcgggtcctgcaagtgaagagagcgatgcaggaaacttcgctcacacctgctcacctgctctcagcagcccagcagaggttttctacaatccctcctgctcccctggccaaaacagatacatggccaaaagatgtgggcatccttgccctggaggtctattttccagcccaatatgtggaccaaactgacctggaaaagttcaacaatgtggaagcagggaagtatacagtgggcttgggccagacccgtatgggcttctgttcagtccaggaggacatcaactccctgtgcctgacagtggtacagaggctgatggaacgcacaaagctgccgtgggatgctgtgggccgtctggaagtgggcaccgagaccatcattgacaagtccaaggctgtcaaaacagtgctcatggaactgttccaggattcaggcaacactgacatcgagggcatagataccaccaacgcctgttatggcggcacagcctccctcttcaatgctgccaactggatggagtccagctactgggatggtcgctatgccctggtggtctgtgtgacattgcagtc

SEQ ID NO: 2807 - DNA, 278 bp, Mus musculus
ctctaaatcggaaattttatttgttcagtacaccaaatatgatgcaagcactgacatgacaaatatacagaaatatgcagctcaacatccaacagtaattcagtttaggaaactggaaaggacatctctttaaggtaatgacaacatactcccaagaatctcttcttcagttagtcatacatttcaataaaataaaggattatgaattgaagtggaagtcagcttgggaattcttaaaaaataaaactccaactctataatccatgccagttaaactt

SEQ ID NO: 2808 - DNA, 401 bp, Mus musculus
  misc_feature (1)..(401): N IS G, C, A OR T
tcagatccggatgaccgtggcggctggggcatttctccacgtggtgctggctacacatttggacaagacatttctgaaacatttaaccatgccaacggtctcacactggtgtctcgtgctcaccagcttgtaatggaaggatataactggtgccatgatcggaatgtggtcaccatttttagtgcgcccaattactgctaccgttgtgggaaccaggctgctatcatggaattagatgacactttaaaatattcatttcttcagtttgacccagcacctcgncggggagagcctcatgtgacccggcgcaccccagactactnnctgtaaatnnctncccaggacctgtctttgnatgnggaagnatacctggcttnnnaaaatatgnatatatacatata

SEQ ID NO: 2809 - DNA, 368 bp, Mus musculus
ggaaactcggtcctccgaccccatcttgctttgctgtctgcagcggtgaccgtggtgaaagggcaactgctagagccatgaagctcctcagcagggccgggtccttctcgagattttattccctcaaagttgccctttttgttaaaacttcagcagcccctggaggagtgcctctgcagcctcaggatcttgagtttaccaaattaccaaatggtttggtgattgcttctctggaaaactatgctcctctgtcaagaatcggcttgttcgttaaagcaggcagtagatatgaggactccaacaacttgggaacctcacatttactacgtcttgcatctagtttgactaccaaaggagcttcatctttc

SEQ ID NO: 2810 - DNA, 842 bp, Mus musculus
acacacaatgctttattgacactaggacagctgggagtcactatgcttttaagttttttttttttttacttcattgagaaaatgttgaattaacattaattaattattaagagacctgactttgatgtgcttgctggtctgggctgagctttaaatacacgcatgtgttataactcgtcgagaaaaggcgtatgtcccaagtttccactcgctgccattgacttcttgccagaaacaaacttttttgcagcctttacaacatcagcatcagccacggagtcaatctgttgaaggacggtagaaggtggcatataagaacctgcagctagagcctgtgacccaatttcactcaggaagccctctgacgtctccacagacattagatatccagcttttagcttgttcttggcagcttggacatctgcactggaaaggtttccttgagcaactgctttgacttggttgtaggcagcattgataacctctccagcagctgcagcctgggaaatagtgtaaattccaaagagcccagagtctgagtaactggcattaaatgcagaaacatcaaaaggctggtgacttcctttggcaacactctggctcaggaggctggtggtgttgttgccccttttgatatgtggtccagcaccaagaagatgctgaagtacactgaatgcatttgcctctgcatttccaatggcagcactttctgcaacaatagcagcatggaccaggttgtctccattctgctctctaatttcacctccacggtatttggcttttgcaccagctaaaccaagggcacccctcatgttgagaaattgttcagcacctgctttaag

SEQ ID NO: 2811 - DNA, 585 bp, Mus musculus
aaatattccaaacgtttattattcatcctaaacactggggcacaaaggccttcgaggtcccctgacccacaattcccacagtctctgccagagcggctgcacacatccccctaccacagacagcccacaccttcccacttggactagcaggtgaggggtagagtgatagcactgcagtcaaactgagggtcctctctcagaccccggccccccagggttaccgtccctgttccggaagtggtctctgctccgcttcttgctgccatggaaaccaacagccttcacacctatggggcctgatgaggactcaggatgggcagcttctgaaggtaccaccacctctggctgtccctggtggccactccattcctcagcctcaggtccagcgagatgggctagctccacagcggcctcaccccccgcacctgacccaacccccttctttaggaccctcttcctctcagccctagcctcactgtccctcactggtttggtgaagaccactcttccctccccacagctagaggggtcctggttgaaagaaggcacatagtctgtgtgggacactggcttcgggatagtcga

SEQ ID NO: 2812 - DNA, 613 bp, Mus musculus
gaagccaggtgtcccacacagactatgtgccttctttcaaccaggacccctctagctgtggggagggaagagtggtcttcaccaaaccagtgagggacagtgaggctagggctgagaggaagagggtcctaaagaagggggttgggtcaggtgcggggggtgaggccgctgtggagctagcccatctcgctggacctgaggctgaggaatggagtggccaccagggacagccagaggtggtggtaccttcagaagctgcccatcctgagtcctcatcaggccccataggtgtgaaggctgttggtttccatggcagcaagaagcggagcagagaccacttccggaacagggacggtaaccctggggggccggggtctgagagaggaccctcagtttgactgcagtgctatcactctacccctcacctgctagtccaagtgggaaggtgtgggctgtctgtggtagggggatgtgtgcagccgctctggcagagactgtgggaattgtgggtcaggggacctcgaaggcctttgtgccccagtgtttaggatgaataataaacgtttggaatatttaaaaaaaaaaaaaaaaaaaaaaaaaagggcggccgctg

SEQ ID NO: 2813 - DNA, 556 bp, Mus musculus
gtgactgtcaggggaaaagctgtagagcagggtgtgtgttgcggggcagagtctggaggggcaggatcacgccgggcaccagccccgcccagggacccgagggcactaggataaagtcaaagttgctcacaccggaggccggtggactcagtctcaggcaccagcatcatgcctatgacactgggttactgggacatccgtgggctagctcacgctattcggctgctcctagaatacacaggctcaagctatgaagagaagagatacaccatgggagacgctcctgactatgaccgaagccagtggctgagtgagaagttcaaattgggcctggactttcccaatttgccttacttgattgatgggtcacacaagatcacgcagagcaatgccatcctgcgctacattgcccgcaagcacaacctgtgtggggagacagaggaagagaagattcgcgtggacattttggagaaccaggctatggatgtctccaatcagctggctcgagtctgttacagcccagactttgagaaactgaaggtggaatacttggagc

SEQ ID NO: 2814 - DNA, 277 bp, Mus musculus
cctttaaagccttttattcttagcataattatttcatataatcttggaccttcactacgtaaatagtcatgatttatgataatttatgcatgacatcagttaaggcgatgaaaggctttatgggaactcccacatagatcagaagctcttcagggcggggttagtcttccaaaaattctactatctacttcataaggctctaacaaagcacttttttgccttaaggggcgcgggcaataaatgattgaacacaagctctgcttcctgggttgaaggg

SEQ ID NO: 2815 - DNA, 634 bp, Mus musculus
tccgaggtgttaaaatgtgtcatctccctgaacgaggatgcctctgtgcacggattcatagtgcagctgcctttagattcagagaattccattaacactgaggcagtcatcaatgccattgcacccgagaaggatgtggatgggttgacgagcgtcagtgctgggaagctcgccagaggtgatctaaatgactgcttcatcccatgcacacccaagggatgcttggaactcatcaaagaggcaggggtgcagattgccggaaggcacgcggtggtggttggtcgaagtaagatagttggtgcacccatgcatgacctccttctgtggaacaatgccacggtgaccacctgccactccaagactgccaatctggacaaggaggtaaataaaggagacattctggtggttgccacaggccagcctgagatggtgaagggggagtggatcaagcctggggctgtggtcatagactgtgggatcaattatgttccagatgatacaaaaccaaatggaaggaaagtcgtgggtgatgtggcctacgatgaggccaaggagagggcgagctttatcacgcctgtccctggtggcgtggggcccatgaccgtggcaatgctgatgcagagcacagtagaga

SEQ ID NO: 2816 - DNA, 699 bp, Mus musculus
cccagagcctcaaaaatcctttatttttagagtctgacctttttctatgaagaagaattcttagtcattcttagtattcatctgacaaaaaaatttccagtattcttgacattaaaaattatattagatgatctaaaaaaattacatgaacatttataagattttctagtatcatttggtttccagtgattagaactgagttgtgcttgtaaaggaagagagtggctgtacagcacactcctgttaaaagccacctacagatgacactgaggatgactaattccaaggaactggatacaatacacttttctcagaggaaacaacttggtttctaaagagcatttacttctgacatttcaattcctgatttcaagggctgcacactgtgacattctgtgccacacttcgggcacgtaaagtatatgtcaaataggaagctactcttaacacagtagtaacaaaatacatgttcacatccaatagtgtgaggcattgtgggccactctccacacagagcacactcttttccactgctgcctagtgtactgtcatgaccagcagcaccagtaagagggatacaccaggaagacaatttggctttcaacttctggatattgataagtggtaagagaaaaatcagaaactcagcaaagccatgccagagaagttccctattcatgtactcaaagccaacttcgc

SEQ ID NO: 2817 - DNA, 605 bp, Mus musculus
taaaactcagaaactgtggtatgctgtgtgcaccattgggggaaagtggttagaagaacgatgttatgatttgtttcgaaaccgtcatttagcgtcttttgggaaagccaaacagttcatgaattttctggttggttttttaaaattaggtgagttgataaacttcttgattttcctacaaaagggaaagtttgcaactttgacagaacgcctccttggcattcattccgtattttgcaagccccagaacatgcgcgaagttggctttgagtacatgaatagggaacttctctggcatggctttgctgagtttctgatttttctcttaccacttatcaatatccagaagttgaaagccaaattgtcttcctggtgtatccctcttactggtgctgctggtcatgacagtacactaggcagcagtggaaaagagtgtgctctgtgtggagagtggcccacaatgcctcacactattggatgtgaacatgtattttgttactactgtgttaagagtagcttcctatttgacatatactttacgtgcccgaagtgtggcacagaagtgcacagtgtgcagcccttgaaatcaggaattgaaatgtcag

SEQ ID NO: 2818 - DNA, 918 bp, Mus musculus
attttaaaacaaaactttattggtaatagttttcaaatatgtttacaacagcacactgttcaagaggaagtctcatccttcgaagcacacaggttgaacgaccccctcgtccacccggggcccccacccaggcctgagagctcctcctttttgggagaagttacgagagggataaacacagggataaatggggtaatttccccagcagctccccacctttctattgagagaaaaagcacaatcagacttggggttgcagtgagtggggacgcacggcaagaggtgatggacagctgacagctaagctagaagcgaggcgcccaggatgagggaggcttcttaagggggctgatgcacaggacaattggcatgagaccactggaaaagggggccgggaggtagcagctcagggcgagattccaagcccagttccttccttgacagggtcagttggctacccgggtgggacagtttggagggtgggaggcactggtggaacttaatttaaatgaaaaaaaaaaaaaccccactggcaagcagccctctgtacaggtcataaaatctccctttccaggtagggctgcatggaagggaaggttgacgttactgttcgttcatccttagtatccaatgctagggtcgggaaagaggctgaatttggggacctctttccatacactacccctggatacaccaacaataattgggtaatggctagaactaagaaattcattgaaaacaagcaaggaaaggtaaaaaaaagggaaaagggaaaaactgaaatagcccttccccaaaatctagaagctttcagaccacctaaaccaagagaataaaagaaattaaataaatgcaagaatactaagacctctgataatcaaacaacatcaacacaaacaaaaaaaatgaaaaaaaaaa

SEQ ID NO: 2819 - DNA, 590 bp, Mus musculus
  misc_feature (1)..(590): N IS G, C, A OR T
gagtttactgagttttaggggtgtgcttgtgccccttgggttctctttcattttttctttttctttctattttttttccggttgggggtgggagggttggatcgaacagccagagggccctagagttccatgctnctaanttaacatccactccacacccccagggttaaggagagcaggaaagcgctccagatactggggaaggggcaacatcagctgctccccctctcccttcttctccacccttccctgcctgttttcaatgaatttcttagctccagccatacccaatcttgctggtgtatccaggggcagggtacggaaagagggccccaaattcagcctccttcccgaccctagcactggatactaaggatgaacgaacagtaacgccaaccttcccttccatgcagccctacctggaaagggagattttatgacctgtacagagggctgcttgccagtggggtttttttttttttcatttaaattaagttccaccagtgcctcccaccctccaaactgtcccacccgggtagccaactgaccctgtcaaggaaggaactgggcttggaatctcgccctgagct

SEQ ID NO: 2820 - DNA, 615 bp, Mus musculus
ccaaatcaccaccaatacatttattcgaggagatgggtctatcttaccacgaggggaggactagatgtcggcctatgtaacctgtgcgtattcgcaccagcacagtgactgaaccctcacacctggcgtcaccagcacagacaagcagatgaggggatggtctgaggagaacatgatttcctattcaggagaaggcaccacccttgtataagaaaattagtgttgggaacatagctccagcctcccatggcccaggtgtgatggcgcccaatttacaaagcaggaagtggggggcgggggtgcttctggctgactggcaggatgagctgggctagaggtgcagggaagccttgccactgagtgacgtttgcctctgcagcctgcctctgcctgagtacaagatggactccagtacctctaggcaggaaggggatgccaccccaacactgctcccccaggcttccccaggtcccaggtgacccacctccaccagcccacatctggacagacacatggcaaatatggacatgaagccaggctgggctggagtcacccttgggcatctgagatgatgggtcctcaccaggggtaggctaagaccccataaatgtttgg

SEQ ID NO: 2821 - DNA, 596 bp, Mus musculus
  misc_feature (1)..(596): N IS G, C, A OR T
ggattgcagtgagcatgctgacctaccccttcctgctcgttggagatctcatggcagtgaacaactgtgggctgcgggctggactccctccgtattcccctgtgttcaagtcctggatccactgctggaagtatcttttagtgtgcagggccagctcttccgcggctccagcctgcttttccgccgggtgtcatcggggtcatgctttgccctggagtaacctaagctgcccgaccaaacatttatggggtcttagcctacccctggtgaggacccatcatctcagatgcccaagggtgactccagcccagcctggcttcatgtccatatttgccatgtgtctgtccagatgtgggctggtggaggtgggtcacctgggacctggggaagcctgggggagcagtgttggggtggcatccccttcctgcctagaggtactggagtccatcttgtactcaggcagaggcaggctgcagaggcaaacgtcactcagtggcaaggcttccctgcacctctagcccagctcatcctgccagtcagccagaagcacccccgccccccacttnctgctttgtnaattgggcgccatcacacct

SEQ ID NO: 2822 - DNA, 737 bp, Mus musculus
gatttgtacatctatattcagctagggcttcacagcagcaatggacagcaatagtgtactcaatatagacacttttcaaaactactccaaaaaacaaatgacaaaagtagttaagaacaactgaacatatgttgtgtgtaccgggcataaaggatgaatgggccctttagttaacccactgcttggataacatgacacttagtccacttccatctctccggagtcggtgtgctgtgagcttcctttgggtggatctgggctggtctctgaaccactctgtccgtccattggtccattgtgctcactaccagtttttgctttgtcttcaggagcttctacttttggtttgggcttataaacgatggggttacagaaattatccagttcctttgactttgtaactatttctgacacttttaccacgggatcttgagtgagacttaatttattctgtgcattcatcttactgtttagccagttcatggagtcactgatgtacttttcaactctttccatttcagcaggatccagatgatcatatctttcatccttgtttctgtgtgcttctatcactttcaggacaagctgaatctttttccccaagtcatttaaagcttttggtctctcttcatgctccacgtacttcatttgaatgggctggccatatttctttaattcctgcagcctatccacataaacttgtttaggctggtcttctccttcttcatacagccaat

SEQ ID NO: 2823 - DNA, 603 bp, Mus musculus
atgaacagggctcaatttgagcagttgtgtgcttccctcttagccagggttgaaccacctttaaaatcagtaatggatcaagctaacttgcaacgtgaagacataaacagcatagagattgtgggaggggccacttgtattcctgcagtcaaggagcaggtgactaggttctttctgaaagacatcagtaccaccctgaatgctgatgaagctgtcgcccgaggatgtgcgttgcagtgtgcgattctctcaccagcatttaaagtacgtgaattttccataactgaccttgttccttactcagtcacattaaggtggaagacttcttttgaagaagggactggggaatgtgaggtcttctctaagaaccacccggccccattctcaaaggtcataactttccacaagaaggaaccatttgaactagaagcattttatactaatttgcatgaagtgccttatcctgatccaagaattggaaacttcactattcagaatgttttcccacagtctgatggtgacagttctaaagtaaaagttaaagttcgtattaatatccatggaatcttcagtgtggccagtgcgtcagtaattgagaagcag

SEQ ID NO: 2824 - DNA, 634 bp, Mus musculus
caacgtgtctagttccttttattagggcaagtgtgagcgtgctctgaaactctcacttgcaagcatgaacagtgaggggcctgcctctatgtgggccgttcccgaggtctggtcacaatatgccaccacagtgggggcaagtcaccttcccttctggcaggaggcaaagcttcagtcataataccatcaggtgatgtttcctcctgcagctgcttaacctcccgatcccagctctccatcctcagcttcttccactgctctctcttggaaaagtaatcaggatacattgctttctcagagggatgccagtaatctaagcaccattctggaaccttgtagcactcatatctctcgaaggaagtgccccccggagagtctgggaagatatacggctgaggatgctgattctgccagaattcttcttctgcctccctcagcagctgggtagccctcatcatatccttctcattcttatgttcttcaaaccgggctctcatcaagcaagcaaagtaccggtacttgtccctgtggatacaacatgactcgaggtggcgcacgcgcgctttatacagccgcagcaccttctgctggtgggtcaggtaggccgggggagcgcagaacggatagtcgaccg

SEQ ID NO: 2825 - DNA, 584 bp, Mus musculus
ttctgcgctcccccggcctacctgacccaccagcagaaggtgctgcggctgtataagcgcgcgctgcgccacctcgagtcatggtgtatccacagggacaagtaccggtactttgcttgcttgatgagagcccggtttgaagaacataagaatgagaaggatatgatgagggctacccagctgctgagggaggcagaagaagaattctggcagaatcagcatcctcagccgtatatcttcccagactctccggggggcacttccttcgagagatatgagtgctacaaggttccagaatggtgcttagattactggcatccctctgagaaagcaatgtatcctgattacttttccaagagagagcagtggaagaagctgaggatggagagctgggatcgggaggttaagcagctgcaggaggaaacatcacctgatggtattatgactgaagctttgcctcctgccagaagggaaggtgacttgcccccactgtggtggcatattgtgaccagacctcgggaacggcccacatagaggcaggcccctcactgttcatgcttgcaagtgagagtttcagagcacgc

SEQ ID NO: 2826 - DNA, 404 bp, Mus musculus
caaaggccaaaaaaaaaattccaactaaaaaataaggtgggaaaaaaaaaggggaaattttaaaaaacccacagaaccaggccaataaaaagggttccaggaggatttaaacgggaccaaaaaaacccatcagtcccaaacgcttcgggccgcctaagaatcagaaaccacccgattcctttccaacgccgttttgtccccgatttccccaaaacccaaagggaacatccccccgaaacaaaaaaaccgaaccaatttggaaaggttccaaaatcccaacccaaaaaccgaaagggccttaaaaaaacgcaagcccttccaattccccgcaataagggttcttcaaaaacttgaaaccaagtcctaaaaaaccctaaaaggcactgtaaacaccaggaagggaa

SEQ ID NO: 2827 - DNA, 551 bp, Mus musculus
gccttgtggagcgtgtggtccgctggcctgtttgctactagggcaggttggtgattctccagggcagccatggcagagccacagccggcgtccagtggcctcactgatgagaccgctttcagctgctgctccgatccagaccctagcaccaaggattttctactgcggcaaacgatgctaagaattaaggatcctaagaagtccctggatttttatacgagggttcttggactgaccctcctgcagaagctcgacttccctgctatgaagttctcgctctacttcttagcttatgaggataagaacgatatccccaaggacaagtccgagaagacagcatggacgttttccagaaaagccacccttgagctcacgcacaactggggcactgaagatgacgagactcagagttaccacaacggcaactcggaccctcgtggatttggtcacattgggattgccgttcctgatgtctacagtgcctgtaagagatttgaagaactaggtgtcaagtttgtgaagaagcctgatgacgggaaaatgaaaggact

SEQ ID NO: 2828 - DNA, 876 bp, Mus musculus
acgagttagacactctttaatatgtattagcgaatcactagaaaaaagtacaggcaggaggctagaaagatagcagttacaagagcagtgtgggagatccttatttggttcataatcacaatgactgggtgttcacagaatatgtacctcccctaaaccttgttcaggtgtgggcatattacccatctggaaaaaaaaaaagtaaaaaaagaaaaagaaaagctgggtgtggtggcgcatgcatatgtagtaggaccctgctggtaatgggggacaaaggatgaggactggctcttgttattaaccatccctggacccagcatgaagttgtacaaatcaattttaacatttcacttggccccaaatacttgtgtttgatagaaaaatctgacagcataggctggcctcaaatttatcatcctcctgcctcggtgtcccagtgtgctaggattacagacatgtactatatcatgctcctctctccccttttaggaagtatgaatgggagtaagacagatgatgtagaaagaatctcaaggtgtaactgtgaacttgctataatcctgcctcagtcagcctcctgagtgaagaaataagtagcatgggctaccaagcccaagctgggttcaaagtgtatcaggtagtgtacaaaaatgaatctcaagagtgagacggggactggagagatggcagtgctcttccagaggtcctgaattcaactctcatcaaccacatggtggctcacaaccatctgtaatggaatcaatacccacagtggactcaaataaataaaatctttagaaaaaaaaatagtgagacggggtgggggtgaggctggcaaagtgggccagttggtaagagcccagcgctcttccg

SEQ ID NO: 2829 - DNA, 573 bp, Mus musculus
tgatcaggatacaggtgatctggtactgcttgatgtttgtccccttacacttggtattgaaactgtgggaggagtcatgacaaaactgattccaaggaacactgtggtacccaccaagaagtctcagatcttctccacggcttccgataatcagccaactgtaacaatcaaggtctatgaaggtgaacgacccctaacaaaagacaatcatcttctgggtacatttgatctgactggaattcctcctgctccccgtggagttccccagattgaagtcacttttgagatagatgttaatggtattctccgagtgacagctgaagacaaaggtacaggaaacaaaaacaaaatcacaattaccaatgaccaaaaccgcctgacacctgaagaaattgaaaggatggttaatgatgctgagaagtttgctgaggaagacaaaaagctcaaagagcgcattgacaccaggaatgaattggaaagctatgcttattctctcaagaaccagattggagataaagaaaagctgggaggtaaactttcttctgaagataaagaaaccatggaaaaagctgt

SEQ ID NO: 2830 - DNA, 582 bp, Mus musculus
tgggagtgaggatggtcggaggggagctggcgctgcatggcgcagagtcgctgagcatcgctagggcgacttcctccgcacctctccacctccgaacctgcatgggccccgggtagccaagtccacacaggtgggggctggcggctgggaagcagccccggccggggagctgcgtgctaggaccgccttccatcccccacaggggtggagccagaccgaggtggaaaccgcctgcagctctatctccgaggttgaggagccgcaagagaaaatggagccggccaagatggcgcctatcaagaacgctccgagagatgccttggtgatggcacagatcctgaaggatatgggaatcacagagtatgagccaagggttataaatcaaatgttggaatttgctttccgatatgtgactacaattctggacgatgcaaagatttattcgagtcatgctaagaaacccactgttgatgccgatgacgtgagactggccatccagtgtcgggctgaccagtcctttacctctcctcccccaagagattttttactagatattgcaaggcagaagaatcaaaccccttt

SEQ ID NO: 2831 - DNA, 762 bp, Mus musculus
cacaagtgctcacttttaattcttttcataaactcatctcacagtcgaggaatgaggtgatcactgtcacacagaaaatactagctatagtacacgggacatcagtaagtcacagacgacacccaagaacaacgcagatgcacatgggtcccaggcagccattcccaagtcacaggggggctcctttccaggccattggcaagagaatattgaatattctcaacggaacttttatgccaggctggcatccaacaggaagaattggaatgactcagagacctggatagaaaaggagccaaacagaactagcagcatgtccagccagaggagggcttggcttggagattgatgtagttcccttgggtggacaaagacatcacatcttccctggaattgttcatcatcttttcaacgaggactctcatggcctcattaatatttttgttctccttgactgatgtttctgtccaacctgtgaagccattctctttactgaactggtcgatctggtcccggctcactgcccaaggggacagatcactcttgttggccaagagcaggcagggcactggctccccactgggtagtgtgagcttgctgtccagatcctgtttccatctttggctgttgctgaaagtagtggcattggtgacgtcaaacataataacacaggcagaagcatctctatagtagagtcgtgtcatggatgtaaacgctcctgccctgcaatatccagagcagcagccgaccatctctgagtca

SEQ ID NO: 2832 - DNA, 597 bp, Mus musculus
gacaaggactctgcacaacctcaattttgtgtgtgcggtccgagaaagggtctaagtcatctgtacttctctaagcaaggtgctggccacggttcaatgctggcgagcgactcggaggttcctgaaaggaattcagagaagcttcaaccaaccgagggtggagatgcctgacttcaattggaagagaacccgggagccaaaggggttgaaataagcgacttcccggaaaaacaaactatcaaaaaacctctccccaccactagccatgggcagccgagatcacctgtttaaagtgctggtggtgggggacgccgccgttggcaagacgtctctggtccagcgctactcccaggacagcttcagcaagcactacaagtccaccgtgggagtggattttgctctcaaggttctccagtggtctgactcagagatggtgcggctgcagctctgggatattgcagggcaggagcgtttcacatccatgacacgactctactatagagatgcttctgcctgtgttattatgtttgacgtcaccaatgccactactttcagcaacagccaaagatggaaacaggatctggacagcaagctcac

SEQ ID NO: 2833 - DNA, 601 bp, Mus musculus
aagagagaaaccattttaatgcaaattaatgctagaaacccagacaaaatacattaccctctttgggaggatgtggggaaagggtgggaatgaataaatcaaatccttctaattctgcccaaacccaaacctttctgcacatctggaacagatctgcacatctggaacagtgctcctcccctaatgcggttatttggtttttttgtttgtttgtttttgtttgttgttttgttttgttttgttttttgactcactttctacttctaatactgaatgctgttttgtttgggcaggaagacgttcacagactgttcctttgaattcattgtctgacctgcctattggagacaaacctctgctactcatagaattattaatatttttttcctgtcaatttcagttgacagaagggataaagactcaacttgcactcgcgtatctgtagtcatatctgccttcaggcatgtgcccctgtgaccgtgtctctgttgaagcttaaactgttggattaaggagatgaaaagcaaaagaaaaattagaaaaaaaattagttggctttttgtttggttgtttgggtgtgttgtggggtttttcgagacag

SEQ ID NO: 2834 - DNA, 516 bp, Mus musculus
gagaatactggcaagattaaagctttcaaccaaaatgatgagcagttcctggaagcctttgtcatcttctgtggcttggggatccagaacacacagatgtatgaagcggtggagagagccatggccaagcagttgttgacattagaggtcctgtcttaccatgcatcagcggcggaggaagaaacaagagagccccaggctttatcggctgctgtggtaccatcggcccaaacccttaaaattaccgacttcagcttcagtgactttgagctgtctgatctggaaacagcgctgtgtacaattcggatgttcactgacctcaaccttgtgcagaacttccagatgaaacatgaggttctttgcaggtggattttaagtgtgaagaagaattatcggaagaacgttgcctaccacaattggaggcatgcctttaacacggcacagtgcatgtttgctgctctgaaagccggcaagatccagaacaagttgacggatctggagacccttgcgttgctc

SEQ ID NO: 2835 - DNA, 129 bp, Mus musculus
tacacttaagaattcaaaattctccgtgctacctaaacaccttatcctaataataaaaaaaaaaaaaaaaaaaaaaaaaaaaaaaaaaaaaaaaaaaaaaaaaaaaaaaaaaaaaaaaggggcggccgc

SEQ ID NO: 2836 - DNA, 65 bp, Mus musculus
attattaggataaggtgtttaggtagcacggagaattttgaatccttaagtgtagggatagtcga

SEQ ID NO: 2837 - DNA, 779 bp, Mus musculus
aaattatttcatcttttttattctgtgacctaccattgagacagtctgtaacaaaagaacagcgattagattagcacagagtatatcagactagtgtccaggaaacagcaactgtccctttggccagctctgctttctcagcagattgcttaaattcgcccacccatccagagacgatggtgccaagagtccacaaagacacagtatgccaaccacgacttctgactgatatttaaattgcacaaagataaagctttaaatgtggtaatttttaaatttagacttatcttgaaaagtctaagagtaaaacgacaaaagggcgtaacttgtaagctagcatggaactcttagaaagcaggtgtttatctccgtacagaccaagggggtatatacacatgaaatgcattttatggcgttctacatcattcacatacatacatttttggcatttaaacaaatatcaaattaagctttaagctagtaacataatttttatttttttaaatataaaaaaagatagccaaccacaaagtaagtacagaaaaccctcatttaatatagattatggaagttttagatatggcaacaaggtagctttctatcccatgctaaaacctaaatgaaactttttcccaaattagtaacaatctagaagcttttcaatctaccaagagaaaatctaccataaccaacaatgtaagttagctgggagagggagggagggaattattaatcagaaccacttgcacacacatgataacgcagcactcccagataga

SEQ ID NO: 2838 - DNA, 485 bp, Mus musculus
gcacagctgctgtgctgcagcgtcggtcagaaaacgaagaatttgttgaagtgggacgactggggccttctgattattttggtgaaattgccctgctgatgaatcgtcctcgggctgccactgtggttgcctgtggccctttgaagtgcgttaagttggaccggcctcggtttgaacgcgtccttggcccgtgctcagacatcctcaagcggaacatccagcagtacaacagcttcgtgtccctgtccgtctgacccgcgcctcctgtgcctcctccccagtccatgcttcactcacgcagactgctttctctccctagccgcagcgcccagtggccactgcttcacagcttcttgtctctttatactaaaagttgctttattgcaccatttttcattgggagcgttattaaatgctcattcacaaataaatagagagttgtatggacttggctgtcaccgcttctctgtgcagtgctcgtgttc

SEQ ID NO: 2839 - DNA, 658 bp, Mus musculus
acagttagatccaagtttttatttgtggagctgcagtggagtcctccctctcccttggggaaagctgaggacacagcaccaacacagggatggacagacagatcccatatggacacacaggtggagcagactcacaaaccagcacagctacacaggcacagggacacacaggccacagcaccaaagaacacacattcacaacagacaaaaccacaggactagggcacacaaacaaagtgcaggctttggggccgctgcatagacagagcaagggtcacatggggaggggggcccctgatgacctccccaggcacaggcacacataaacagcacacagacaggcagatgtccccagctagccagccagcctgccacagggacacatgaatcgtagagggacaagcatgactctccatgtggagcatggatggcagggcttccacacgccccacagccctgaactgcttacagctattcaatctgagcctcccctccccccattgccttcatatacactttggtcttggccaccagggcatgggctagggcttttggcaggtggaagatggagagagagagaggtcccttctgatctgggaggcaggtgctgagagtccaggcgagagcggcctctaggcagtggggtgagggtggggct

SEQ ID NO: 2840 - DNA, 561 bp, Mus musculus
tggccaccgacggcttgtaagtgagtcctttctctgggccgttgtctttccccaaacgagcaccgcgttacagttaagtagtcttttcacagagccctcagagcccctgcctgaggagcccaagcttgaggtgttggccttccaccactgccacaaggaccccgtgcctcagtcaggcctctctccagagagggtgcaagcccggaggcagctgtatgccgcctgcgctgtgtgcttcatcttcatggccggggaggtggttggtgggtatttagcacacagcttggccatcatgactgatgccgcccacttgctagcagacataggcagcatgttggccagcctcttttccctctggctttccactcggccagccacccgcaccatgacctttggctggcaccgctcagagactctgggagctttggcctctgtggtctccctctggatagtcactggcatcctcctgtacctggccttcctccgcctgcttcatagtgactatcacattgaggcgggtgccatgctgctgactgccagcatcgctgtctgtgccaatct

SEQ ID NO: 2841 - DNA, 838 bp, Mus musculus
caggaatagatgggtttatttagcattaagtttgaaactcttgctttaagcaagggtactacagtaattatatcaggaacagacatttcctacactgtcaaatatataaaagttcctttgcactttcaacactgatcaacaagcagattcagtccatgttactttgatgtatctactcagttaacccaagcttcttcttcagagactctggcatctcaaggggaggagggcgagggagcctgaagtagaccttcacagagtcgtagatgaaccactgtagtgcagtcagagtgccaatcatgatgattcgggcgaagagccccttccacacacctctgaagcccagcctctgcaggacctgagacgcggtgctgcctttctctttattcagcacagagaccacagagtcagcagggtgggagacgatcgcacagaagactccagctatgtaacctgccacaaatgtcacaaccagctgctctgcctttgtacattcacttcggggcttaggaaccacaaatttgtacaaagcttcaacagtacgttcaaagcaggcgaacttcatcatggtgtacgggatctgtctcatccacagaggagcaacgcccttgtagaacgcatttaagccttcctctttatacattttgggaacagcttccctcaaggtgttggcataaccaggctgggtttgaattcgaacttttagcagcttccataggagccagggcaatgtcagcgaagaattcagcactggcagaagaagctaaatacagtgatgtgcgccacaggtaggtgttttcctcaccaagtatgttgccatataaggctttgaagactt

SEQ ID NO: 2842 - DNA, 528 bp, Mus musculus
gacattcggcctctgtgagccgcaaccttgcccagcgagcggttgggtgttcgccatcttaggaggatgttctcgtccgtagcgcacctggcgcgggcgaaccccttcaacgcgccacacctgcagctgtgttctatggcctgtcgggtccccgcagtcccccagctccgccccggctttggtggggtcttaagttgtgggctgacacacactgctgttgttcccctggacttagtaaagtgccgcatgcaggtggaccctcagaagtacaaaggcatatttaatggattctccattacactgaaagaagatggcgttcgtggtttggctaaaggatgggccccaactttgattggctattccatgcaagggctctgcaaattcggcttttatgaagtcttcaaagccttatatagcaacatacttggtgaggaaaacacctacctgtggcgcacatcactgtatttagcttcttctgccagtgctgaattcttcgctgacattgccctggctcctatggaagctgct

SEQ ID NO: 2843 - DNA, 670 bp, Mus musculus
agttgttttatatttaatttacaaaagagaccccaaaattataaactatccaggagcagggagtagagtcaggccttctctggcctagctcgattctccatcttctctggcaagatgagggcatctcaggggatgtttctctcccccttagaacaggggggtgacagatggtatgggtgctctgctaagcatcctgggagcactgcctactccagacttttgtctcccccctaacaggcccctcatgccaaggagatccttgcaccagaggccagctggactgatatccagggggagagatccctcataaggtccaggtgagagccacagctaccaaacccagcaggctggtgaggtgggatccagcccaggctctgctggcatttccagctgcccccttatagttccgttggcactgctcgccaccccagcccagatagcactggcagcgaaagtgcttctgcaggtagttgaggtcggcttcgctgagctgcccctcgggtcgaagctggggttcactgggggtatggccaggcactaggcggaagctgctggcattgaggtgcaggaaggtattggcgctggggttgcggcgacacatcgcccatggccatggcactgggtccaactgcaatactgggtggcccaggacacgttgactatgtaggga

SEQ ID NO: 2844 - DNA, 599 bp, Mus musculus
  misc_feature (1)..(600): n is g, c, a or t
ctggttcgagttcctgagctgctaccaggcaggtaacacttcctgtagcccccagcatgcgggcaggactaggtcccatcatcacactggccctagtgctggaggtagcatgggccggggagcttaagcccacatcgctgcccatcttcactggccgaccctttgtggtagcatggaacgtgcccacacaagaatgtgccccacgccacaaagtgccactggaccttagggccttcgatgtgaaggctacaccgaatgagggttttttcaaccagaatatcaccaccttctactacgaccgtctaggcctgtatccacgttttgatgcagccgggacatctgtgcatggcggtgtgcctcagaacggcagcctctgtgcacacctgcccatgctgaaggaatctgtggaacgctacatccagacccaggagcctggggggctggcagtcattgactgggaggaatggcggcctgtatgggttcgaaactggcaggagaaagatgtttaccgacagtcttcacgccagctggtggccagncggcaccctgactggccatcagacagagtaatgaagcaggcccagtacgagtttgagttc

SEQ ID NO: 2845 - DNA, 590 bp, Mus musculus
tcccctctctctgggtattgagactctgggaggcgtctttaccaaacttattaataggaacaccactattccaaccaaaaagagccaggtgttttctactgctgctgatggacaaactcaagtagagattaattcgtgttagggggaacgagagatggctggagacaacaaacttctaggacagttcactttgattggaattcccccagcccctcgtggagtgccccagattgaagttacatttgacattgatgccaatgggattgtgcacgtttctgccaaagataaaggcactggtcgtgagcaacagattgtaatccagtcttctggtggattaagcaaagatgatattgaaaatatggttaaaaatgcagagaagtacgctgaggaagaccgcaggaagaaggaacgtgttgaagcagttaatatggctgaaggaattattcatgacacagaaaccaagatggaagaatttaaggaccagttgcctgctgatgagtgcaacaagctaaaggaagagatttccaaaatgagagcgctccttgctggaaaggacagtgagacaggagagaacatcaggcaggcagcat

SEQ ID NO: 2846 - DNA, 95 bp, Mus musculus
gcggccgcccttttttttttttttttttttttttttttttttttttttttttttttttttttttttttttttttttttttttttttttttttttt

SEQ ID NO: 2847 - DNA, 655 bp, Mus musculus
ccatatacacatctctatatttatatattagatacaggcacggggagatggggaggggcaccggctctccacgggccccacccccacatccaatcacccacacacagaagcagcaagggcgttacatgtggcagcttgagagagagagggttaggcctgggctcctcagggaaactagcccttgagacttaggaatgttctgtcagggaaaatggggtggggttccaacaagatgaatagggcagagcctaactcagtgccctccacccctccgtagcacaggtcctaggacgatcatagcccctccattccagaacggtctaccagagccggggctagcaagggtagataaagacacagcagcagagatcagctctggggccacctcatcactcaggctatggggagatggggcaggggattggagtgggagaagcctgcttgaagcaggagaccccagcaaagtgagagaaggtggccaggcccacccttggtccagcctgggctgccggggtctgggttgagcaaagttcactttctaacaatctgcagagaaggagcaggtaggagcaggaccagatccaaaaggacaggggtgtctgttcttgttaggggccctctggcgcccctggctgggaacgggctgtctcctgga

SEQ ID NO: 2848 - DNA, 542 bp, Mus musculus
tggtctgtgggctgcattctggctgagatgctctccaaccggcccatcttccccggcaagcactacctggaccagctcaaccacattctaggtatcttgggttccccatcccaggaggaccttaattgcatcttttacatgaaggcccgaaactacctgcagtctctgccctcgaaaaccaaggtggcttgggccaagctctttcctaaatctgactccaaagctcttgacctgctggaccggatgttaaccttcaacccaaacaagcgcatcacagtagaggaagcgctggctcacccttacctggaacagtactacgatccgacagatgagccagtggccgaggagccattcaccttcgacatggagctggatgacctccccaaggagcggctgaaggagttgatcttccaggagacagcccgcttccagccaggggcgccagagggcccctaacaagaacagacacccctgtccttttggatctggtcctgctcctacctgctccttctctgcagattgttagaaagtgaactttgctc

SEQ ID NO: 2849 - DNA, 510 bp, Mus musculus
atggtaataacacaatgacctttattgagaaggtccaaacatcataactgaagtacttttcagtttagcttgtcgaaatacttcagttttccagctggatctgggattattgtttcactaccaggtttccagccagcagggcagacttctccatgcttgtcagtggactggaaggcttgaaccaaacgcaggacgtcgtccactgatcttccgacaggaggtcattcagagtaatctgcctcaggactcctttgtcatcgataataaagaggcctctaagagtatgtcctgagtcttcaaggtatacaccatagtcctttgagatctgatggttcaggtcagaaagaagtggaatccttattggccccagtcctccttgtcttcgaggggtattaatccaggccaagtgggtaaactgagagtcaacagagcatgctaccacttcagtatttatagatttgaattcttcaattcgatccccaaaagcgatgatttcagttggacacacaa

SEQ ID NO: 2850 - DNA, 535 bp, Mus musculus
gcgcgccgttttagctggctgcctggcggcaggggactctgtgctttagcagagggacgtgttttcgcgcttgcttggtcatggaggcgcggtccaagctgctggacgggaccacggcgtcccgtcgctggtcctgatgctggtgttgctcctgccgccgctgctgctgttcctgttgcggaccgaatctctgcaaggcttggagagtgatgaacggttccggacccgcgaaaatgagtgccacttctacgctggtggacaagtgtaccccggggaggcgtcccgggtttcagtcgcggatcactccctgcatctaagcaaagccaagatctccaagccagcaccttattgggaaggaacagctgtgattaacggagaattcaaggagctcaaactgactgactatcgtgggaaatacttggtttttttcttctacccactggatttcacctttgtgtgtccaactgaaatcatcgcttttggggatcgaattgaagaattcaaatctataaatactgaagtggtagcatgctct

SEQ ID NO: 2851 - DNA, 510 bp, Mus musculus; identical to SEQ ID NO: 2849

SEQ ID NO: 2852 - DNA, 535 bp, Mus musculus; identical to SEQ ID NO: 2850

SEQ ID NO: 2853 - DNA, 693 bp, Mus musculus
gcttgagacttgctttattgtctttggcaagggctgaagtactatggttggaggcattgggggtagaagggtccggtccggtcacttgatttaagcagtggacagctttggtgttggtgcctgcgggtgcccattggcatcgccggtgcagccattggtggcaggtgtgggctctttcttgcaaggcagtgggctggtggccaccacctctcctggcttgatgcctgggcctggacgctccatcttgtgctctaatagcatgtggttctggggcgggacccacgcaagccctgaaaatattctcgatacagctgcgctggcggaagagggcattcactacagggctgcccgggggcacaagcggggccttaaacaggaagctaagcagggacagcactgtgtggaagccctgaggctcggggtccgagtctgtgcagaagctcacgcgctgacacagctctgtgagcagcactaggtccagcatgatgggcgcggccacgagcggatcctcgcaggtattatggagcaccaaggtgtttgtcccacccagcatcagctcggaggtgtactcgtccaaggcacgctcgctgtcgccaacatagggcacatatttgatcaccacacagtgtactggccgctctccattcgcgtagacacatggttgctgtgaccatgtcgtccacacactgctct

SEQ ID NO: 2854 - DNA, 557 bp, Mus musculus
agacagcacgtgcggacaacctcatccctggcacacgtgcccaacagttggtgcaaatccgaaaggacattagagatttccgatccagtgcgggattggataaggtcatcgtgctgtggaccgccaatacggagcttttttgcgaggtggtcccaggtcgcaatgacacagcagaaaacttgctacatactatccagcttggcctggaggtgtcaccgtccacactttttgctgtggccagcatcctggaggactgcgccttcctcaatggatccccacagaacacactggtacccggtgccctggaactggcttcgcagcgccatgtgtttgtaggtggtgatgacttcaagtcagggcagactaaggtcaagtctgtcctggtggacttcctcatcggctctgggctcaagaccatgtccatcgtgagctataaccacctgggcaacaacgacgggcagaacctgtctgcaccgctgcagttccgctccaaggaggtgacaaagagcagtgtggtggacgacatggttcacagcaaccatgtgctctacgcgcct

SEQ ID NO: 2855 - DNA, 529 bp, Mus musculus
ccttttttgtttttttttttcttgttctttggcattttatttcaaaattgcagcaagtacggagaaaaggggggggggggggaaggacacgaagagcaccggggatccggcctgagaacggagatagagaagaagccaaggttctcccttgaacaccaggacgcggacagcctgagtcctgagacccaaaatttgaggtggcgtccaaattgcatgggtcccgcccttaaggctttggagtgtaaccccacgagggggtgccagagatccagcatctggacagacctttccctattgcacttctcttgagtctctgggaagcgaggacgctggactagatgcggcacgtctgcagatccaaccagggagggcacagccccaccgtcacacccgaaacatccaatcgtgggcactggctccgtactgaatagccttcagttccttctggaagcgcaggatgagctctgggccgttctccatggtaggtatgtggagttgcttgccttcatacaggatttggtgcaccggg

SEQ ID NO: 2856 - DNA, 580 bp, Mus musculus
aggccgcgccccaggcgggcacagtcaccagccgcacacaccggatcatggctgcagccacactaggacaggtctgggcccgaaagcttctgcctgttccctggcttctatgtgggtccaaaagatgtgtgtccttttattcaaggctgcagacctccagattcagatgaccaaagaaccacagaagaagccagcccctagccaggcactgctgtttgggaagaccttcacagaccacatgctgatggtggagtggaataacaaggctggatggggcccaccaaggatccagcccttccagaacctcacgctacacccagcctgctctggtctgcactactctctgcagctctttgagggcttgaaagcatacaaaggtggagaccagcaggtacgcctcttccggccctggctcaacatggacaggatgctacgttctgctaggcgcctctgcctgccagactttgacaagcaggagctgttggagtgtatccgccagctcattgaagtagacaaagactgggttcccgatggcaacggaacgagcctctacgtgcggcccgtgctgatcgggaatgag

SEQ ID NO: 2857 - DNA, 473 bp, Mus musculus
aaaaacctgcctttattctattagttggaaaaattaactggtacagaaaaatgtttagtcagctggagagaagagacccccccacccccacccactgccacccaaaagaactgggggcccctctgggaggcaacttggatacagtgtggagaaaggagcactgggacttagagccagaccctgcagtccaggtgagaaaggctatgccacctccaaagtataactgcctcaggcgggaaaccaaattcctacttagtccagtctggaaaggggtactagaatgatatatagggctgaataagggatatggccatattttatcagagaaagtgacaaaatgggaattttaaaaatgaattcttccatctgactttattcccaaatacactttcttaaaaaaaaaaaaaaaaaggaaaaaagaaagaaagaaagaaaaagaaaagaggcaatacactttctgggggaatgacaaa

SEQ ID NO: 2858 - DNA, 581 bp, Mus musculus
  misc_feature (1)..(600): n is g, c, a or t
gctaattcaaagaatttcttaacttcttgcttctttctagaaagagaaacagttggtaacttttgtgaattaggctgtaactactttataactaacatgtcctgcctactttctgtcaactgcaagaactctggngattcactacttcagagctttccttgttaacagactccattgccagagctctggggtgggtattcagttttttgaaatcttgctcagccagaaaggcccaagtccacgcagctgttgcagagttacagttctgtggtctcatgttagttaccttatagttactgtgtaattagtgccacttaatgtatgttaccaaaaaataaatatatctaccccagactagatgtagtattttttgtataattggatttcctaatactgatatttgtcattcccacagaaagtgtattgcttcttttctttttctttctttctttctttttttctttttttttttttttttaagaaagtgtatttggaaataaagtcagatggaagaattcatttttaaaattcccattttgtcactttctctgataaaatatggccatatcccttattcagcc

SEQ ID NO: 2859 - DNA, 667 bp, Mus musculus
aagaacaagtttctctaaaatccttcagccaccagtgaaatgatcaggcagaataaaaacttctgtagagggagtgctgtcatcaaaaataaatacagttgcatgggctgctcaaagagaaaccaaactgaacaggaaggcggggctggaacattatcttaaacgccctcaatggtggttcactgggctgaggctaggcaggaagcaggtctggtcaccatcttagagcaggaggtcatgctgcacagaccagattaggctctgatgatgcacatggacctgtgacaaaagtgacatccagcagggtccagagtgggtcaggacagccagcctggctcctcactgctgcagctccttcatcctgttgagggcactgcctgcacggaaccactcgatctgggtctcgttgaaggtgtggttcaggaggatggtctcctgggtcccattggggtgcttgatgacgcacttcagaggctttccaggggcaaagtccttcaggccttgaatggtcagcttgtccactggatgaatcttgtcatagtcggaggggtcagcgaaggtgaggggcagcaagccctgcttctttagattggtttcgtggatcctggcgaactcttggtgatgatggcccggcccccaaggtggcgatgctccagtgctgcatgct

SEQ ID NO: 2860 - DNA, 570 bp, Mus musculus
tgtggcccttgcatcggccagtgggacagaaaagacatcaagaagggggagaagaatacaatcgtcacctcttacaacaggaacttcacaggccgtaatgatgcaaaccctgagacccatgcctttgtcacattcctgatattgtcacagctctggccattgcaggaaccctgaagttcaatccagaaactgacttcttaacaggcaaggacggcaagaagttcaagttggaggctccagatgcagacgagcttccccgatcggactttgatccagggcaggacacataccagcacccccctaaggacagcagtgggcagcgggtggacgtgagccctaccagccagcgcctgcagctcctggagcctttcgacaagtgggacggcaaagacctcgaggacctgcaaatcctcatcaaggtcaaagggaagtgcaccacagaccacatttctgctgccggcccctggctcaagttccgtgggcatctggataacatctctaacaacctgctcatcggtgccatcaacatcgaaaatggcaaagccaactctgtacgcaatgctgtcaccc

SEQ ID NO: 2861 - DNA, 590 bp, Mus musculus
ctgtacaagaggcactttattaactggccggccggggggggggtaagcacagggctgggcatacaagagggtgggttgggatggcacacaaggcaggcacaggaaaccttgggacctcaggctgggagcggtgtctccaagatcctgctatcttacggatggccaaagtaggggtgaggggcgggccttagcatacggtaggtaaagtgaagaaccagtctactggctcccaagatcaagaagtttggcaaacagattctctagtttcaagtgatagaaaccagataggcctagttaatttggaatatagaacacacccacacctcagtccctgaaaccatcccttgggtgaacttaagtttctcatctcttacaaagagagcagtgtgcattactggcagaaaaagggctggggaaacaggccctattttcattcattttccaacctcaagttttccatttagaagtcatcagtcaaagcaactctgtagggtctaagtacagaggcctgctttccacaactactcccaaccaccagcagcaacaccaatcgttcctcacacagggccctcctcgcagatgctgtctgt

SEQ ID NO: 2862 - DNA, 542 bp, Mus musculus
acttctgattgtgggtagtgtgggcatcctggccttcttcttcttcacccatcggatcagaattgtgcaagatacagccccacctctcaattattactgggttccgatcctgacagtgatcattggctcctatccgtccgtgcacggcttcttcagcgtctatggcatgtgcgtggacacgctgttcctctgtttcttggaggatctggagagaaatgacggttcagccgagaggccttacttcatgtcttccactctcaagaaactcttgaataaaaccgacaagaaagtagcagaatcctaaagacacctgcctcccagccctctcaggacgccgggataggtgcttgctgtgcagctgggtcagagtccccagctcatcagacttgcctaacacatcactgcctctctgcaccctccccgagttcccatttccaggaacctagaggactggggcatctctttcctatgccaaagggcacttgggagttttcagtgcagccctggaagatgggacagaatggatctctccagctcttact

SEQ ID NO: 2863 - DNA, 439 bp, Mus musculus
ggggcaaagtgcagggcaagccgggcagtggtggcgcacgcctttaatcccagcacttgggaggcagaggcaggtggatttctgagttcgaggccattctggttgacagagtgagtcccaggactgccagggctacacagagaaaccctgtctcgaaaaaccaaaaaaaaccaagaaaaacaaaacaaaacaaaccaaaaccaaaagaaaaagaaagtgcagggcagtcacaggctctggcagcactgcagcttgttgggtctctgtccatcgggggggggtggcacactgatgtccaccacgttgttgccaggggactcatcgtgggctgcacggtcagcgatttgcttctgtgacacaatacggtagatttctgggaggatgttcttgaatgcttcctctacattgggggaatccaaggctgaggtctcaatgaagg

SEQ ID NO: 2864 - DNA, 733 bp, Mus musculus
  misc_feature (1)..(800): n is g, c, a or t
tgctggccaggagcgctaccgtgccattacctctgcgtactaccgtggtgcagtgggtgcactgctggtatatgacattgccaagcacttgacatatgagaacgtggagcgctggctgaaggagctgcgggatcatgcagatagcaacattgtcatcatgctggtgggcaacaagagtgacctgcgccaccttcgggctgtgcccactgatgaggcccgtgcctttgcagaaaagaacaacttgtccttcattgagacctcagccttggattccaccaatgtagaggaagcattcaagaacatcctcacagaaatctaccgtattgtgtcacagaagcaaatcgctgaccgtgcagcccacgatgagtcccctggcaacaacgtggtggacatcagtgtgccacccaccaccgatggacagagacccaacaagctgcagtgctgccagagcctgtgactgccctgcactttctttttcttttggttttggtttgttttgttttgtttttcttggttttttttggtttttcgagacagggtttctctgtgtagccctggcagtcctgggactcactctgtcaaccaggctggcctcgaactcagaaatccacctgcctctgcctcccaagtgctgggattaaaggcgtgcgccaccactgcccggcttgccctgcactttgacccnnnnnanannnnnnnnnnnnnnnnnnnnnnaaaaaaagggcggccgctt

SEQ ID NO: 2865 - DNA, 586 bp, Mus musculus
acaaaaggaaatttatttcaaaagcataagggagcatttacatttatttaaacaagggagacacaggtgtccttgcggaagaaaaagattcatggcatgaagattttctttcagatttctgaagcaaaaggaacactaagttatgaactactgactaggcaaggggaaggaagcaaaggatgaggaggggtgaatgcagtgagctctgcagtagacatgaggtcaagttacttctgccgagtttacaaatgccctcaggcaaagaggaaaagttactgtgttcaaatttatgttgctatagtccaattcatttttgtacttgaaatggctttaggccacgctgatctatctctgaggtccataactagatggtcacaggattcagctggcaatcccatgttcctatgtctgttcagcttccaagggagcctaggttcagctcaggcttgtggaatgtccagagtttattgccagcactccataggcaagctgaccaacttcttgtgctcacttgtatcactctagactttcagaaatattttcgccataaatacatgcagtgattctcacaaaggagattgttttt

SEQ ID NO: 2866 - DNA, 675 bp, Mus musculus
agcattgtcatgagattaatatacttaaatctactactcattggattgccggggatgtccctttaaaaggactgctgccttcagctgaaaatgtaatgttctttctacctttgtatgtatgatctacttttgtaaatactatggttgtgtccaaggtaaaaccacaacaatatttttggatgctttgtctgcagccttgacttgttttcacaatatcctcactatccagacttcatcttgtgaatcttgcttttacacatcttgatggtttgtcactgagatctgactctattggaaaagtcagtctagcctgtgatctggtgaagatcatcactcttgaaacgttactgttctcctccccattccgttaggtttctgcccaacacatggagaagagttaagaacagtcttaaccttccgctttcattgttttctaaggaagctgctaggcagtgttgtcgcattcctgccaagtcatagaaatgaagcaccagcttctcacagtgtacaggcgttgccagccttttagaaagaacttgctttgcactgccccttcagtcttctccatattttgggatacagctttgaacacagggtcttattatttgaataggagtacatgtgcataatatacgtacagacataagcatatgttgtgtgtgtatatatgcatgc

SEQ ID NO: 2867 - DNA, 463 bp, Mus musculus
gggcacaaatttaaaaaatgttcttaatttggaacgcacagaggtacatccaggcatttttgatagcatgggtaaggttcagggtggttatatatattccttttgacaagggggagcatccatgggcttcaacacatagtagacagggaaactcaatcaatcacgaaggtaaagaaaggggatctatttacataacaaacacttaagacaatcaagatggggagggtgcagtcaagtcttcacagtgcgcgtctgttaaccctgtaaatcttcacggtatggtcctcgccacagcttgcaaaatgcaaccactccggcccctcttcactctgctcggtgtcgtcatcgccatcatcgtcgtcgtcatcgctgcagctcttccagcataaccttttgatacccaggctgtgactctggcttggatttgtttctacacagctggtccaggcattgatttcttggt

SEQ ID NO: 2868 - DNA, 573 bp, Mus musculus
tgctggaggtgtctcatgtgttttgctgcccgaaccgggttcgaggagctttgagttggaataccgggcccggaggactcctggctttcggcacatcctgctccgttgtgctctatgaccctcagaaaaaagtgtttattaccaatctgaatggccacaccgctcgagtcaactgcctgcagtggatacgtacagaggatggctccccttccaatgagctggtgtctggaggatctgacaatcgggtgattcattgggaactagagaataatcaggttttaaaatcagtccgtctccaaggccatgaaggacctgtttgtgctgtgcacgctatttaccagagtgggccatccgaaggggagcagcatgcgctgatagcttctgcagcttcagattctactgtgcgaatctggtctaaaaaggggtctgaagtcaaataccttcagaccttgagcttcagggatggattcgttctttctgtctgcctggctattttgcctggtactaatgtgccagtattagcatgtggtgatgatgactgcagaattcacttatatattcaacaggatgacc

SEQ ID NO: 2869 - DNA, 474 bp, Mus musculus
ctttattttgcatacttttaattttagaacaaaataaaacaaacaaaaaaaccacaatacataacacccaaccctgctattctgtgggaggggatcttcctgccttaaggcttttttacaggatagaagattcttgtagacatgagcagagagccaggtgggtcagggctgctgggggagccacggggatactatacagagggcagggcttcttccaggaggctttaatccacctcttccatgcgcgaggcatcctcatcgccttccagaggggggatctcatcaggaacagcagcactgggctcctctgcagtgacctcatcttcatcgatgcccaggcctagtttaatcatgcggtagatgcggttggagtgggtttggggatcctcaagtgagaaaccagaggagagcagagcagtttcaaacagcagcaccaccgggtccttgacagctttgtcgtttttgtctgcctca

SEQ ID NO: 2870 - DNA, 559 bp, Mus musculus
  misc_feature (1)..(600): n is g, c, a or t
gagaacaagaagaagaagaacaacatcaaattgtatgtccgccgtgtgttcatcatggacagctgtgacgagctgatacctgagtacctcaactttatccgcggtgtggttgactccgaggacctgcccctgaacatctcccgggagatgctgcagcagagcaagatcctgaaggtcatccgcaagaacatcgtcaagaagtgcctggagctcttctccgagctggctgaggacaaggagaactacaagaagttctatgaggccttctccaaaaatttaaagcttggaattcatgaagattccactaaccgacgccgcctctctgagctccttcgctatcacacctctcagtctggagatgagatgacctccttgtcagagtatgtgtctcgcatgaaggagacccagaagtccatctactatatcactggtgagagcaaagagcaagtggccaactctgcctttgtggagcgagtgcggaagcggngcttcgaggtggtgtatatgactgagcctattgacgagtactgcgtgcagcagctcaaggagtttgatggga

SEQ ID NO: 2871 - DNA, 559 bp, Mus musculus
gagaacaagaagaagaagaacaacatcaaattgtatgtccgccgtgtgttcatcatggacagctgtgacgagctgatacctgagtacctcaactttatccgcggtgtggttgactccgaggacctgcccctgaacttttcccgggagatgctgcagcagagcaagatcctgaaggtcatccgcaagaacatcgtcaagaagtgcctggagctcttctccgagctggctgaggacaaggagaactacaagaagttctatgaggccttctccaaaaatttaaagcttggaattcatgaagattccactaaccgacgccgcctctctgagctccttcgctatcacacctctcagtctggagatgagatgacctccttgtcagagtatgtgtctcgcatgaaggagacccagaagtccatctactatatcactggtgagagcaaagagcaagtggccaactctgcctttgtggagcgagtgcggaagcggggcttcgaggtggtgtatatgactgagcctattgacgagtactgcgtgcagcagctcaaggagtttgatggga

SEQ ID NO: 2872 - DNA, 519 bp, Mus musculus
ctttattttgcatacttttaattttagaacaaaataaaacaaacaaaaaaaccacaatacataacacccaaccctgctattctgtgggaggggatcttcctgccttaaggcactggacaggatagaagattcttgtagacatgagcagagagccaggtgggtcagggctgctgggggagccacggggatactatacagagggcagggcttcttccaggaggctttaatccacctcttccatgcgcgaggcatcctcatcgccttccagaggggggatctcatcaggaacagcagcactgggctcctctgcagtgacctcatcttcatcgatgcccaggcctagtttaatcatgcggtagatgcggttggagtgggtttggggatcctcaagtgagaaaccagaggagagcagagcagtttcaaacagcagcaccaccgggtccttgacagctttgtcgtttttgtctgcctcagccttctgccgcagggtctccacgatggggtggtcagggttgatct

SEQ ID NO: 2873 - DNA, 559 bp, Mus musculus
gagaacaagaagaagaagaacaacatcaaattgtatgtccgccgtgtgttcatcatggacagctgtgacgagctgatacctgagtacctcaactttatccgcggtgtggttgactccgaggacctgcccctgaacatctcccgggagatgctgcagcagagcaagatcctgaaggtcatccgcaagaacatcgtcaagaagtgcctggagctcttctccgagctggctgaggacaaggagaactacaagaagttctatgaggccttctccaaaaatttaaagcttggaattcatgaagattccactaaccgacgccgcctctctgagctccttcgctatcacacctctcagtctggagatgagatgacctccttgtcagagtatgtgtctcgcatgaaggagacccagaagtccatctactatatcactggtgagagcaaagagcaagtggccaactctgcctttgtggagcgagtgcggaagcggggcttcgaggtggtgtatatgactgagcctattgacgagtactgcgtgcagcagctcaaggagtttgatggga

SEQ ID NO: 2874 - DNA, 385 bp, Mus musculus
ctttattttgcatacttttaattttagaacaaaataaaacaaacaaaaaaaccacaatacataacacccaaccctgctattctgtgggaggggatcttcctgccttaaggtactgattaggatagaagattcttgtagacatgagcagagagccaggtgggtcagggctgctgggggagccacggggatactatacagagggcagggcttcttccaggaggctttaatccacctcttccatgcgcgaggcatcctcatcgccttccagaggggggatctcatcaggaacagcagcactgggctcctctgcagtgacctcatcttcatcgatgcccaggcctagtttaatcatgcggtagatgcggttggagtgggtttggggatc

SEQ ID NO: 2875 - DNA, 316 bp, Mus musculus
ctcttaggcacatctgttttatttccattgggttccgttctagaggccctccaaggtccatcagaaaggaagcaggacgggtagggtcagtctgtttttccatccatccctagcttaaggttccctccttggcctcaagccacactgggaggtcagcttgcagaaggcagagctcagaggcccctggaaagggcacggttcggcgtctaagccagggccgtcaataacataatgaacgagagaagagtccaacccagactgtccggcttttgtcttgcacggtaggggctggggcccaggttcaggggcccagcag

SEQ ID NO: 2876 - DNA, 533 bp, Mus musculus
gcgctttggtgtggcacctgaccatcctgaagtaaagaatgttatcaacacatttacacagacagcccgctcagaccgctgtgccttccagggcaatgtggtggtgggcagggacgtgtcggttccagagcttcttttagcctaccatgctgtggtgctgagttatggagcagaggaccaccaacccctgggaattcctggcgaggagctgcctggagtggtctcagcccgggcctttgtgggctggtacaatggacttcccgagaaccaggagctggcgccagatctgagctgtgacacggctgtaattctgggacaggggaatgtggctctggatgtggcccggatcctcctgaccccacctgagcacctggagaaaacagacatcacagaggctgcattgggggccctgaggcagagtcgggtgaagactgtgtggatagtgggccggcgtgggcccttgcaagtagcgttcaccattaaggagcttcgggagatgattcagttgccaggaacccggcccattttggatc

SEQ ID NO: 2877 - DNA, 524 bp, Mus musculus
gaacgagatcactttattggatttgagccaggggaggtgacactatttttccagacttcaaaggagactgctatagcataggtcacctgaccatcttaaacagcaataaaaaagtaaatttgaaacctttatttcgaattaaagccaacacttgagtgtgacaaacacagcattcagctcgaagaagcaccccgctaatggagtgagcgtttattctgcacaatcacgacatgtggactaacccaggagagggcacagggacactgggcagggctggcacctagtcctcctcacccgggtcctctctctccagagtgtagaccatgaagcaagcgtcgggtctcttggggacaaggggatgcccgggtctcacaatctcaaagccaagaaagctgaaggttcggagtagggcggctctgtcctcacggttcttggggaagcagatgaaaacgtggtcagcctggagttgctcctctgcgaactctaggagagctgcaaaactgtccttactgccctcaggcaga

SEQ ID NO: 2878 - DNA, 589 bp, Mus musculus
gagcagcggcggcggcgcgggaagtgcagcggaggtttttgctggtttcggaccccagcggccggatggtgaaatcctccctgcagcggatcctcaacagccactgcttcgccagagagaaggaaggggacaatcttctgcgccacgcttcacgccagccgcaccatgccgcttcttagtcagcacagccgcggcggctgcagcagcgagagttctagggttgcccttaattgctgtagtaacctgggtccggggcctcggtggtgctcctgatgtccctcacccacccctgaagatcccaggtgggcgagggaacagtcagcgggatcacagtctttcagctagcatcctgtactccgacgagcggctgaatgtgacagaggagccgacgtctaacgacaagaccagggtcctgagcatccagtccacgctcacggaggccaagcaggtcacctggagggcggtgtggagtggtggtggcctctacatcgagctcccagctggacctctgcctgagggcagtaaggacagttttgcagctttcctagagttcgcagaggagcaactccaggctgaccacgttttcatc

SEQ ID NO: 2879 - DNA, 514 bp, Mus musculus
aacatgaaagagaaaatgatagttttattaaactagttaatgcttgcacacaattacatacattttaaactgccaggatttttgataagtacaataccattttcggataagcatagtataactttaaatattacatcattcagactcatgttggaaaacattaacttataagggattacagcaatgtccatttactgtctgtagcaaaaagggtccctgttagatgtctcagcatatggacggctcctctactgcctgagcgccctcggtgacagctttgacacacttggccattgtctgtgaggctctgctaatggagtctgtcatatagaagtcttttatagttagctgaggtggaacgagtgggtcagcaagaacctcctggtttactagcttggcaagctcacttgcttgctgaaagtaattagtttcttcaatatcatcatatcgaaccagattaggagagacctcttcaagacggttccttacttgatccagagtgtcatatggaaga

SEQ ID NO: 2880 - DNA, 595 bp, Mus musculus
cgggctcgctctcggaaattgccgaacaggtccgaagacggggaaaaacagtcgaatctgtgtttctagtccctcctggctttccgtcctccaggtcgggctgacagaggttgccgtggccgccatattgacttagcggccagggttttgaggggtcagggagacccggacaggtccgcggaactactcggtgggctccggaggaaagccatcatgttaaggatacctataaaaagggccttgataggcctttctaattctcctaaaggatatgttcgcacaactggcacagcagcaagtaacttgattgaagtatttgttgatggtcagtctgtcatggtggaaccaggaaccactgttctgcaggcttgcgagaaggtcggcatgcaaatccctcgattctgttaccatgaaaggttgtctgttgctggaaattgcaggatgtgcctggtagagattgagaaagctccaaaggttgtcgctgcttgtgctatgcctgtaatgaagggctggaatatcttgacaaactcggaaaaatctaagaaagccagagaaggtgtgatggagttcttattagcaaatcacccattggatt

SEQ ID NO: 2881 - DNA, 482 bp, Mus musculus
cattttgaaaaagctatttattttttccacataatattccagatacatgttacaggtaagggttagtatgggtcagaaaacatcccagggaaggaagccattttgaacactggaaaatgctaaccaaaaaagccaatgttcacatatatagatctgtttcacagaaaaacttcaccaaagacagaagcagctaactttcttgctatatgaaaattgtcttctgaactgctagctgactttttaaatgggctccactggacaaacaagggggtcaggcatcagaacgaattcggtttcagatcaacctgactttgactgcaaaatccaggcagaggctggctagaaacagcacgctgggtgagatcagagcctgtggcactttctcagcttaacccagacagaagtgaagcatcctcagatcaggggcccggcccatcccgctgagggctccaagcttcttgtcagtccccgaaggaggaaga

SEQ ID NO: 2882 - DNA, 625 bp, Mus musculus
gagactgtcgtttggtctcccatccagaatgtcgggaccgatgaccccttccctgcatcccccccctggtggggacaccggttaagattggagagggcatgctggccgacttcgtgtcgcaggcttctcccatgatccctgccattgtcgtcagctgtgtcaatgagatcgagcagcgaggcctgactgaggcaggcttgtacaggatctcaggctgtgaccgcacagtgaaagaactgaaagaaaaattccttaaggtgaaaactgtgcccctcctcagcaaagtggacgatatccacgtcatctgcagcctcctgaaggacttcctgcgcaacctcaaagagcccctcctgaccttctggctgagcaaagccttcatggaggcagcagagataacagatgaagacaacagcacagccgccatgtaccaggctgtcagtgagctgccccaggccaacagggacacgctagccttccttatgatccacctacagagagtgtctcagagtccagacactaagatggatattgccaatctagctaaagtctttggccctacaatagttgcccatactgtgcccaatccagatccagtgacaatgttccaggacatcaaacgtcagct

SEQ ID NO: 2883 - DNA, 641 bp, Mus musculus
  misc_feature (1)..(641): n is g, c, a or t
cgacatcatcggtacactttattcctcagggcattacacgctaacttttcctggagcgggtcagtgcatcgagttctgtttctgtggaagatgtgcacctttccaaacggcgtggctggctgtctcaccctccggtagggcctctgtgcacaggaagcggttcctccagcacaaagccagcctctggggcctggacacaagagattgctctgtctagaagtgcctgttggacgcccctcttcggtcttggtggccagcatccctccctggctgcttggagcctcggtgcccggcctggcatgcatatgctgtagttaagggtaaagtgacagggtcattcacaggcgtgtccacaacagagatgctcatggcctcacacggactcctcagcagacagcagaagtgggttgatgtactcaaagccttcaaattcggactggtcgatcctctttatgacgtcctcatcatctggggtcagctgcacaggctcgctggtgaactgcgtgtcaaagttgtccaggccatagtcatctgtgatctggggctggaagggaggcagggtctgcttcttttccagcaggtcccagtctatgctgcggaagaaagcatgagacttgatgtncgaaaaccagtctgtggcc

SEQ ID NO: 2884 - DNA, 702 bp, Mus musculus
  misc_feature (1)..(702): n is g, c, a or t
atgataatatcaaagatgattctgaggaccttaagcctgtcatcgatggggtggatgggatcaaaatctctcaggggctggggctgcaagacttcgacctcatcagagtcatcgggcgtggaagctatgccaaggtcctcctggtgcggttgaagaaaaacgaccagacttacgccatgaaggtggtaaagaaggagcttgtccacgacgacgaggatatcgactgggtgcagacagagaaacatgtgtttgagcaggcgtccagcaaccccttcctggttggcttacactcctgcttccagacaacgagccggttgttcctggtcatcgagtatgtcaatggcggggacctcatgttccacatgcagaggcagagaaaacttccagaggagcatgccaggttctatgctgctgagatctgtatcgctctcaacttcttgcatgagagggggatcatctaccgggacctaaaactggacaacgtcctccttgatgccgacggacacattaagctgacggactacggcatgtgcaaggaaggtctaggccccggtgatacaacaagcactntttgtggaaccccgaactatatcgcccccgaaatcctgcgaggagaagagtacgggttcagcgtggactggtgggcactgggtgtccttatgtttgagatgatggctgggcgctccccctttgacatcatca

SEQ ID NO: 2885 - DNA, 520 bp, Mus musculus
aacacagcagcatttttattgctttggaagattttccctacagcagacattctattgcacagctgcttgattttggcattttagaaagttttcagaagatatttattccagagtaaaaagacattctatagttgaaagcaaaggagctcaggcctcagggggacagttggtttatctatgtagcattgcatttggttattcttatggcaattttccagagatcattttgaaatgtagatagtaggaaagcttcacccctttaggagcctgagtaagaaaacagcagagctataagttgagagcaaccctttcggcttaagcaagggagggggtgcggggacgtggcattccaaatgctggctgaaacatgtctgccaattcggtaagcagagtaaacccaggagacaggcacccactgtggagaacacaagcctggtcaagggcttcgtgcaatttcttaagagttgcatcaacactatgattcaccaaagagaggtcaaaggaatgagcatactgacta

SEQ ID NO: 2886 - DNA, 687 bp, Mus musculus
caggattaatcccttctcctgagctacaggaatggagagtggcaagcgtggctcactctgctccaagtgaagcaccaagttgcagtccctttgggaagaagaagaagtgtaaagacaagtacctggctaagcacagttccatttttgaccagttggatgttgtttcctatgaggaagttgttcggctccctgcattcaagaggaagaccttggtgctgatcggagccagtggggtgggtcgtagccatattaagaatggtctgctcagtcacaatccagagaagtttgcgtaccctgccccatatacaacacggccaccaaagaagagtgaggaagatgggaaggagtatcatttcatctcaacagaggagatgacgaagaacatctctgccaatgagttcttggagtttggcagctatcagggcaacatgtttggcaccaaatttgaaacagtgcaccagattcataagcaggacaagattgccatccttgacattgagccccagaccctaaagactgttcggacagctgagctttcacctttcattgtgttcatcgcacctactgaccagggcactcagactgaagccctgcagcagctgcagaaggactctgaggccatccgtagtcagtatgctcattactttgacctctctttggtgaataatagtgttgatgaaactctta

SEQ ID NO: 2887 - DNA, 625 bp, Mus musculus
caggcccaggtgtttatttcccttacatgtaggatggttcacaaacacaatacaggggctttggcaccgtgggggaggggactatcccaggcctcttagggtctcatgtataccgaattcagacccgaaagctctgaatttctgcatcagacatccagtagaacttgggagtgaagctagagccaaggccatctaagtgacaggccaaagtgacacgaagcccacttcctgtgctccaaccatgagtttccagcccaaaccaatggaaggtgatttcacttgtcagggcccaaagggacagtcagttctactccctcccctcactaggagccaccttggtgacagttgattctacccactgtaagtgtaaagggattggcctggtcccaaccataatagggcggtggaaacggctcaggagggtacagcgtggattaggccacaagatggggcagatgatgtcatcagaagcatgtgaccggtgggagcagttactaaacttctgggcaactagtccatgctatgcaggcaggtagagggattggcagtgctcattggttggcattgatgatgtccacaaattcaggcttgagagatgcgccacccacaaggaagccgtccacgt

SEQ ID NO: 2888 - DNA, 580 bp, Mus musculus
ctgaccttcagagacttgagcctggtacaatggcgcctaccaggaagttcttcgttgggggcaactggaagatgaacgggaggaagaagtgcctgggagaactcatctgcaccctgaacgcagccaacgtgccggcaggcaccgaggtggtttgtgcaccgcccaccgcttacatcgactttgccagacagaagctggatcccaaaattgctgtggccgcacagaactgctacaaagtgaccaatggggccttcactggggaaatcagccctggcatgatcaaagacttaggagccacctgggtcgtgctggggcactcagaaagaagacatgtctttggagaatcagatgagctgattggccagaaagtgagccacgccctagcagagggactcggggtgatcgcctgcatcggggagaagctagacgaaagggaagccggcatcaccgagaaggtcgtgttcgagcaaaccaaggtcatcgcagataatgtgaaagactggagcaaggtggtcctggcctatgaacctgtgtgggccattgggactggcaagacggcacccctcagcaggcacaggaa

SEQ ID NO: 2889 - DNA, 831 bp, Mus musculus
  misc_feature (1)..(831): n is g, c, a or t
ccttgagtaccctggaaatgcacagtcatccctttaaatagtgctttcacaaatggtaggaccccaccttcatctccagctgatggctgttccctagccatcttcacaagtcattcccatggtgcctctggtcagcacagaaccccgccaccacacacactgctactcccacagtttaaatcgccaccagaccaagccttagacaagatggtcagcagacctcttctcccactgccctccctcccccatcctgtctttgggaccacacaagtctttcttcctcaaagactgacaggctacagcccttctctgttctccctgggactcccgaatctcagataccaaggcagttttcagatgaaagggagggcgatcacccttggtataggggtgggggcatgggaagtgaggccccaggtcgattctggggtcctattcaagagaagcacaccaagagagagcaggcggggtcacactgtacagggcagagagtgagaggagatagggcacggggaggggcttcagggcaggcttccggttacttggtgccatcttccgcgttgccctcaccatccatcttgccttcctcttcagtcttcaggtcatccgtgctcagcttctgctcttttttcctcctcacgcatttgaccaccatcagcaccaagatgaccacagccaggaaaccccccactgaggcacccacgatgnacgccaccgtggagtcccgctctgggggtacttctagaaggnactgcaggtaaatcttgccgtggatgcggtggcggtctggagggttggtaatgtagcagttgtaaatgccttcgtcttcta

SEQ ID NO: 2890 - DNA, 695 bp, Mus musculus
aataaagcttcctcaatgttgcatatgtctttgaagtacatccgtgcattttcttttttagcatttaaccattcctaccttgtggtccttggtccctcaatcaccctttcccacagcccacccgcctaacgtcacagtctctgaaaatgcacagggatgcctggctacctcgccctgccttcagtctcacggggctcagtctgtttttctctttggtgcccccggggcggagcatggaagtcacagcgcccaccactcttagtgtcctcaatgggtccgatacccgcctgccctgtaccttcaactcctgctacaccgtgaaccacaagcagttctctcttaactggacttaccaggagtgcaacaattgcacagaggagatgttcctccagttccgaatggagatcattaacctgaagctggagcggtttggagaccgcgtggagttctcagggaaccccagtaagtacgacgtgtcagtgactctaaagaacgtgcagctagaagacgaaggcatttacaactgctacattaccaaccctccagaccgccaccgcggccacggcaagatttacctgcaggtccttctagaagtacccccagagcgggactccacggtggcggtcatcgtgggtgcctcagtggggggtttcctggctgtggtcatcttggtgctgatggtggtcaaatgcgtg

SEQ ID NO: 2891 - DNA, 614 bp, Mus musculus
aaagtttagctttatttttatttttttactaaagtccacaaatttctggaagtcaagtactttaatgaaatgttttcaaagaaatgttgagcaatatatgctcgtctgcagaatgtgcagctcaatgtccatacctaattattaatgtgcattaaaatcagcatagagctgttttgaattttaaccataatgaaaacccaggactcctaatttcgtcaaatgtgtttacaagcaataataaattcagacccactgtattatgccatacacatctctggaaagcagcatgaaacagtgggatcagatcagtaaaaatatacacacagataaaagaaatacacaaagtactgtagttttattaaaaactactacttgagaaagaaacctttccacaaatagcataaaaatgtagactggtaaaaggaatggggaaagctttacaaaagcctaattccaactggatcttcccgagggtggtggcaaagggtatttccgtccttctctgggatatccctgtctccctcctcggtgatcgtcacgtctgggtggatagctccaggtcctcctagcatctggtactgatttggctgaaggctgcattttggttttggatc

SEQ ID NO: 2892 - DNA, 759 bp, Mus musculus
  misc_feature (1)..(759): n is g, c, a or t
gttggttacactctcccgctggcccggctgctgtttcgagctgcccgctggtcatgggagtcccggcgttcttccgctggctcagccgcaagtacccgtccatcattgtcaactgcgtggaggagaagccaaaagaatgcaacggtgtaaagattccagttgatgccagtaaacctaatccaaatgatgtggagtttgataatctgtatttggatatgaatgggatcatccacccctgcactcatcctgaagacaaaccagcaccaaaaaatgaagatgaaatgatggttgcaatttttgagtacattgacagacttttcaatattgtaagaccaagaagacttctctacatggcaatagatggggtggcaccacgtgcaaaaatgaatcagcagcgttcaaggaggttcagagcatcaaaggaaggaatggaagcagcagttgagaagcagcgagtcagagaggaaatacttgcaaaaggtggctttcttcctccagaagaaataaaagaaagatttgacagcaactgtattaccccaggaactgagttcatggacaatcttgctaaatgccttcgctattacatagctgatcgtttaaataatgaccctgggtggaaaaatttgacagttatattatctgatgctagtgcacctggtgaaggagaacacaaaatcatggattacattagaagacaaagagcccagcctaaccatgacccaaatactcatncattgtttgtgtggagctgatgctgat

SEQ ID NO: 2893 - DNA, 285 bp, Mus musculus
aattgggcaatacacttttatttttccgtttacctttgcagccatctttttgtaatggggtaaacaacagaagggaagggaattacataaaatggaacgcaaatgggttttagaacaccttaacgattatgacagggcaattataaaaaacttttttccttagtaatatatattggttttttaaagtacattaaagagctgccgtatctagggttagctaggaaagagcattggtaccatccccggagcccacctttttgaaggtcttgactccagatttgaaac

SEQ ID NO: 2894 - DNA, 584 bp, Mus musculus
attaaaggcgtgcgccaccactgcccggccaggactacatttctaacagcatttggcacccagcaatcactcatccactcatgtggttcttggggcttgcttcttcctgaagaggagctggttacctggaatggctttgcccgccctgcccttgccccagtgcactgatggtttcttcctcccttcccttccaggcttctggctgcgatgggtcggagattcctgatgaagtgaagctgatcgggttcgcccagttgagtgtgagctgatgtacgccccttgctgtcaccctcatctgtcgtgacccttccctctcccagctccccctttgcctccttcctctcaccccctcactcccaaatcccaacaaataagaagattgtgaagaggctggcttcgatgaagtgcgatcaaaaaaaaataataataataatttaaaaaaaaaaaaactgtgagcactccgagttctgctttattgtccagcaacccacagtgtgagcacaggcaagccctacagctgcgcaactgttgctgattcctttccagagagctatttactattcttagcagtcaatttggctagc

SEQ ID NO: 2895 - DNA, 220 bp, Mus musculus
aaccagccactcatggtttaaatttttggggcacacatcctatttgccatcgaaggagctatggcagcccgttgacagcactgattggtgggacactttgtttttgcataacatggggaaaccccggggttatgggatactagctacctcccagagctgccttgtttgttgccaggaaaccgttggggggcaggggagagacagggagaggaagcatcca

SEQ ID NO: 2896 - DNA, 593 bp, Mus musculus
acaggacagtggttctgggaacgatgatggtggcttcagtgaggagtgggaggcccaaagagacagtcacctggggcctcatcgctccactcccgagtcaagagctgctgtccaggaactttctgggagcattctaacgagtgaagacccggaggaaagaggagtaaaacttggactgggagatttcattttctacagtgttctggttggtaaggcctcagcaaccgccagtggagactggaacacaaccatagcctgctttgtagccatactgatcggcctgtgccttacattactcctgctcgccattttcaagaaagcgttgccagccctccccatctccatcaccttcgggctcgtgttctacttcgccacggattaccttgtgcagcccttcatggaccaacttgcattccatcagttttatatctagcctttctgcagttagaacatggatgtttcttctttgattatcaaaaacacaaaaacagagagcaagcccgaggaggagactggtgactttcctgtgtcctcagctaacaaaggcaggactccagctggacttctgcagcttccttccgagtctccctagc

SEQ ID NO: 2897 - DNA, 646 bp, Mus musculus
  misc_feature (1)..(646): n is g, c, a or t
gtttatagataatgggactttattataaaacctttcttttggcattagttggttacagggatagcaagatcctgtgagtgcgcacagcagctctaacctcatgcgcagttgccgcataatgcaccgagattcaggttactgcaaatcaatcgtcactcccagcgcacagccttgcatacacatttttcaggaggagcggattctacaggactggactaaatgttgggaagactacaaaagcagtagttcctttatgggaaactttcctcaccctcccctccaatgactttgctttagaaaatggattcttagagctcgtctgaacagcgtcagcacacaggagtcatacttagttcttgttaaaagcagcacctggacagctttagcgcacaggcaagagatgaccgctctaaccactctacgctcctgcataagaggccttagaaagcatcgtccacttcttccggatgccctcgctgctatacactcgccggtatgtcactttctctgcagggtttactctgaagggaccgtccaatatacctccaatattcctttcttatagngnccttttctttagctaggatctcacataactctagtgctttattaagaatgtcctccttgttgtcacggatagtcgatt

SEQ ID NO: 2898 - DNA, 580 bp, Mus musculus
tgacaacaaggaggacattcttaataaagcactagagttatgtgagatcctagctaaagaaaaggacactataagaaaggaatattggaggtatattggacggtcccttcagagtaaacactgcagagaaagtgacataccggcgagtgtatagcagcgagggcatccggaagaagtggacgatgctttctaaggcctcttatgcaggagcgtagagtggttagagcggtcatctcttgcctgtgcgctaaagctgtccaggtgctgcttttaacaagaactaagtatgactcctgtgtgctgacgctgttcagacgagctctaagaatccattttctaaagcaaagtcattggaggggagggtgaggaaagtttcccataaaggaactactgcttttgtagtcttcccaacatttagtccagtcctgtagaatccgctcctcctgaaagatgtgtatgcaaggctgtgcgctgggagtgacgattgatttgcagtaacctgaatctcggtgcattatgcggcaactgcgcctgttggttagagctgctgtgcgcactcacaggatcttgctatcactgt

SEQ ID NO: 2899 - DNA, 616 bp, Mus musculus
atcaggatagaaatttatttaaatccaaaataatatgactatagttagaataatgtaataattatttaaaggaaatatcatcattggctctgaaacagtctaaaggtgtcatttttctggattcaaaaacatgtataagaatatacaggaagcaaaaatactgaagcaagccggctgagtgtggaagctgtaacaggagggtacactaagatactgtaacaagggccaacaagctgccttacctatcaagccctggacagtaggtcagtaaccctgaatgaaggaataatagcatgtggttaacaggacaaatttccctctaatttgtctttgtaacagatttctttcctttttaccatcatgttgacaaaacatttggttttatttgcaaagtggatatcctaatcagagtgctcaattttgttgaaggtgctcaaggctcaaacttcaaaaaggtcaactgggctagttagtgaaaccattgggtgtgctggctaaacagatgaaagcggcagcatttaaaatggatagaaattcccagggattgctgtgatgtagacaatcaaaagcagacagacgacctttgattagaccattacttctagagtgagctaga

SEQ ID NO: 2900 - DNA, 575 bp, Mus musculus
gggttccggggagcagcctccggcctctggtactggagcggccggcggcggcccgtgggcagccttgcagcggtgtgttctaggtcaatggcttctaagactccagttggattcattggactgggaaacatgggaaatccaatggcaaaaaatctcatgaaacatggctatccactcatcctctatgacgtgttccctgatgtatgcaaggagtttaaagaggctggggaacaggtagcatcctccccagcagaagtagccgaaaaggctgacaggattatcacaatgctgccctccagtatgaatgcggtagaagtttattctggagcaaacgggattctaaaaaaagtgaagaaaggctcattattaatagattccagtactattgatccttcagtttcaaaagaattggcaaaagaagttgagaaaatgggagctgttttcatggacgcccctgtctccggtggtgtaggagctgctcggtctggaaaccttacatttatggtgggaggagttgaagatgagtttgctgctgcccaagagttgctggaatgcatgggctccaacgtggtata

SEQ ID NO: 2901 - DNA, 570 bp, Mus musculus
aaaggggaaaaaaaaaaaaaaaaaaaaaaaaaaaaaggggcaaaaaaaaaaaaaaaaaaaaacaccagaggggggggcaacggggggggggccccccctaaaaccccccaacaaaaaaaaaaggcccccggggaaaagggggggcaaaaagtccaaaaaaaaggggtttaaatgccccctaaaaaaaaaaggaagccccacaaaagccccccccaaaacacaaaaaaagaccaacccccagggggaactcaaaaaaaaacccccccccctataaaaacccacacactttacaagggggaaaagccggggaaaaaaaaggaaaaaaaaagagcggatgcaaaaaaattttcaaaaaaagaaaaggtaaaacaaccccgggggaaaaaaaaggggagtttaccaacgtaaaaaaccggggaaaaaccaccccttcccggggccccggccaaaaggggtacaaaaccctgggaaaaaagggatttaaccccggggggcagggggcaaaacaggagcaaaaaaaccccccggggccccaaaaaaggtgtaaaccccccaaaaaggcaaataggg

SEQ ID NO: 2902 - DNA, 575 bp, Mus musculus
  misc_feature (1)..(575): n is g, c, a or t
gcccggcatggaggatggaggcagcaagtttgagccctaggcggcacgagccgccgccgccaggctgtgggcgttcatctgaagtcggcacgggggatacaggatggagccccacggatttcagtttttctgactgttaaatgagaggatgattgctcacaaacagaaaaaggcaaagaaaaagcgtgtttgggcatcaggccaaccttctgctgctattacaacttctgaaatggggctcaagtccgtaagttccagctccagttttgatccggagtacatcaaggagctggtgaatgatgtcaggaagttctcccatatgttgctatatttgaaagaagctattctttcagactgtgttaaagaagtcattcatatccgtctggatgagcttctccgtgttttaaagtcgatattgagcaagcatcagaacctcagctccgtagatcttcagagcgctgcagaggtgctcactgcaaaagtgaaagctgtgaactttacagaagttaatgaagaaaacaaaaacgatatatntccgagaagtcttttcctccattgaaacattggcatttacc

SEQ ID NO: 2903 - DNA, 636 bp, Mus musculus
ggaggctgaaatgtttttaatatggaaagtaagggctacagtgaggggaggcagattctgtgttaacagccgtacactgtggagttggtccgatagagcgaagggagttctctggacgtgccacctcacaaccagtgagactcgtagtcaagcacgaatctgaagaagccatgtgcaacaagctgccagctcaagaatgctgatccaggggacgtcaaagagtgagcgctccgccaacctccaactccacggtaaggagacggagttcagccaacgaattcatgacgacaaggtgcaggatcgtgctggcaaagaggaagtcagcaaaggctcgctccggagagatgccttggaagtccgccttgttctgggggttgatctgtattctcaggcaaaccgctaggatgaagctgcccacacaagagatgaagccagagaggaaagagttgaaggggaaggtgcccacgaggagacagtagccgaactgcagcgccccggtcagcagtatataaaggagataggcgtccagcaacttcagccgctgcggagtggagctcaagtgctcctccaagaaccgggagatgacggacaccacagacgccgacatgacgaacgcagggacttcaggataatcga

SEQ ID NO: 2904 - DNA, 575 bp, Mus musculus
gaagtccccgcgttcgtcatgtcggcgtctgtggtgtccgtcatctcccggttcctggaggagcacttgagctccactccgcagcggctgaagttgctggacgcctatctcctttatatactgctgaccggggcgctgcagttcggctactgtctcctcgtgggcaccttccccttcaactctttcctctctggcttcatctcttgtgtgggcagcttcatcctagcggtttgcctgagaatacagatcaacccccagaacaaggcggacttccaaggcatctctccggagcgagcctttgctgacttcctctttgccagcacgatcctgcaccttgtcgtcatgaacttcgttggctgaactccgtctccttaccgtggagttggaggttggcggagcgctcactctttgacgtcccctggatcagcattcttgagctggcagcttgttgcacatggcttcttcagattcgtgcttgactacgagtctcactggttgtgaggtggcacgtccagagaactcccttcgctctatcggaccaactccacagtgtccggctgttaacacagaatctg

SEQ ID NO: 2905 - DNA, 378 bp, Mus musculus
ggttaacagaactttattaagtcacagaaactttagtgcaaaacaaaatctaggtccatttaactgcacaggctgtctcctggcaaccggagcacaggaagcttctactctacacagagacccctcagttcatggcccactgccaggcagacgcttcactcatgaggtgaacaggcaggtcaacaagagctacaggtggtgggaaagccgtgcaggaccccaaacagccaggcagacgcacacacggtcaagggcctcacacacaaaagaccaggcccacgtgaccgtcacacggcacaggcaagttacattcacaagtttcgcctccccaccctaccccacagaaccccaacaaggcagacgggaagacaggaaagc

SEQ ID NO: 2906 - DNA, 572 bp, Mus musculus
aggaaatctgtgtgctggctggcttctgtaatgaggtcaagagagtgccaatgaagactctggtccctgccaccgagaccattaagaacatcctccctgccctggagatgatggacccctatgagcagaatctggtccaggcccacaatgtgattttatgccagacctgtcagtttgtgatgaataggttttctgagctgattgtcaataatgccactgaggagctcctagttaaaggtttgagcaacgcatgcgcactgctccccgatcctgccagaaccaagtgccaggaggtggtgggaacatttggcccctccctgttggacatctttatccatgaggtaaaccccagctctctgtgcggtgtgatcggcctctgtgctgcccgcccggagttggtggaggcacttgagcagcctgcgccagccattgtatctgcactgctcaaagagcccacaccgccaaagcagcccgcacagcccaagcagtcggcattgcccgcccatgtgcctcctcagaagaatggtgggttctgtgaggtgtgcaagaaactggtcctctatttggaacat

SEQ ID NO: 2907 - DNA, 505 bp, Mus musculus
caacccaagctggctttaatgagatttgtcttataagttaaatatgtatctggcaaagaacaaaacaagaatgaagatccacactggtctccccaaagggcacccactcagaccagtgggccgcttccataggcctagtccatcagctagccatccttaacgctgctggggctccccagggcctatccctcagccctgtttgttctactcctgggactggtcatcccttgactcctctggtccctggcccctcccaccctacggtttctttttcagtgccaccaccccattggacctcctatcagcaactgtctcaggtggaacctcagacttgacccccgccctgtcattccctactttagagagtccacagtcccaagcccctgaggtcccacttttctggacctggctgtacagagctgtatctgagctgaagcctttgctgccactgccacgagtggtaaccgattcgggaaggatcaagccctgtggcttgggggcagga

SEQ ID NO: 2908 - DNA, 573 bp, Mus musculus
atggagggtccgctttttctgcagagtcagcgcttcgggaccaagaggtggaggaaaacttgggctgtgctttacccagccagtcctcacggcgtggcgcggctggaattctttgatcacaaggggtcgagctctagagggggtcgaggcggctctcgccgtctagactgcaagatgatacgcctggctgaatgtgtgagcgtggtgccggtgactgtggagagtccccctgagcccggcgctgttgccttccgcctggacaccgcacagcgctcgcacctgctggcggcggacgccgtatccagcaccgcctgggtgcagactttatgcagaaccgcctttccgaaaggcggctgggctttggcgcagacggagaaccaacctaagttttctgccttggagatgctggagaattcgctgtacagccccacctgggaaggatcccagttctgggtaacctcgcagaagaccgaggcttctgaacgctgcggcttgcaaggctcctacatactgagggtggaagctgagaagctgactctcctgactttgggtgcgcagagtcaaatcctggag

SEQ ID NO: 2909 - DNA, 738 bp, Mus musculus
aaccccacattcattatcatgttttattgtcttctatgatgtaaaggcagttggaggttttaatcccccccccccacacacacacacacactattccactgaagactatgagtgtgcagctgcggttacaacacggcccttggtggcttggcagatataagctctctgaagaaagcatgcagatctagagaaacgttggtttcagcgtcaggaggtgtgtgagaatcttagttacacaggccatgtggcgagtagggacataatgcaaacccttgctaacctcatttcaaatatgtgatcaaaaatggactcagaattacccagaattactcaaaactgccacttgggccagcagctccccgtttgcttattggtttgtttgcaactcatgatttggatcacaattgtccattttcttgaaaatgccatcctgctgagtccccatgggatgtgtggaaatctggatactacggtatgcacttgacattccgaggaatcagggctgtagtataaaaccatactggggagcctccttttcagatcctcacggaccaggatttacagttttctggtgttccagtggcacacagggtggtgaactgatccacacaagcgtttcggatcttctccggagtggcggggctgtctagctggaagagctgtttggcgttactgtctccgtgctgagctcgagctgcgcgtatggcatctttgatggcaaagaagatcgaagaagcc

SEQ ID NO: 2910 - DNA, 577 bp, Mus musculus
gcccagggttcgggggagatatataaacaagggagatataaaaacaggggagatataaacaggggagatataaacaagggagatatatggagaaagaagaaacaggactgaataaatgtgtgcagaaggatcctgtagcagcgtcgttcttcctgactagttgagcgcgctcgacagttcgctgtggttgcatcagagctgggtgcagttgttcccggacatcacttggctgtcggcgagccacctcttttcctggcttcttcgatcttctttgccatcaaagatgccatccgcgcagctcgagctcagcacggagacagtaacgccaaacagctcttccagctagacagccccgccactccggagaagatccgaaacgcttgtgtggatcagttcaccaccctgtgtgccactggaacaccagaaaactgtaaatcctggtccgtgaggatctgaaaaggaggctccccagtatggttttatactacagccctgattcctcggaatgtcaagtgcataccgtagtatccagatttccacacatcccatggggactcagcaggatggcattttcaag

SEQ ID NO: 2911 - DNA, 683 bp, Mus musculus
ctgaaaaagatatttattttaaaatttgcacataatctttggataatttagaattaacaggtatgttttaaaagtttctgacacaaacccggaaaccaagagcaatgagagatttgattggcagaaggaatcaagaggatcctgcatttaggatgcatagatggctagtgacgtcagtgcccacgtagaaagacactttcctatagcactcagtcacagattttaaactacctgtcgcaaatactaaatacctcatcagactaacagtgacgcccacatccactccgtagtccactttactcaagtatccacatttacagagcacagagaaagtctaacagacatcagaatcatattacacttattaatttactcccccacattaataagaactaaaaactagaatctacccagtgtagtctccatctctaatgtacctcttgctgacctcttgaaggaacatcagcttcctgggcactctatccgcagtcctgatgccttataatgagccaggaattccctagacctaacccccacagcggccaagcagcccaatgctctgcacaccctgaggtgcaggcagcaagacaggtaggctcctgcacgttgcaaatgatgcagatgcctcacaacagaaaggatgccctgcttttctctactgccctccctgcagcaaggccagt

SEQ ID NO: 2912 - DNA, 583 bp, Mus musculus
ggtgacaatcctacctcacaaggctgtgtggggaccgcaggaaaacatatatctgggctgtgtgaggaccactggaaagcacgtggctgggctgtgtccacggtgcataggaagtaggtaccctgatgtctttccttgtttccttatggagggtcacacccatactgggccttgctgcaggagagggcagtagagaaaagcagggcatcctttctgttgtgaggcatctgcatcatttgcaacgtgcaggagcctacctgtcttgctgcctgcacctcagggtgtgcagagcattgggctgcttggccgctgtgggggttaggtctagggaattcctggctcattataaggcatcaggactgcggatagagtgcccaggaagctgatgttccttcaagaggtcagcaagaggtacattagagatggagactacactgggtagattctagtttttagttcttattaatgtgggggagtaaattaataagtgtaatatgattctgatgtctgttagactttctctgtgctctgtaaatgtggatacttgagtaaagtggactacggagtggatgtgggcgtcact

SEQ ID NO: 2913 - DNA, 545 bp, Mus musculus
aatgtttcaagttgctctttattttcagaatcaagtcagccagaagcacacaggaaagcagagagcaggaggaagcccagccccagggggagtgcaggtggagctggcatccaaggcagctggctccttaagcataggtggtaacatattggggtcccatgttcccaaagtaggatcgctcccactcgctcataagttcaaagtgcacaggacgatgacagaagttgcatgcagccacagacacatcttggaggggcagccccacctcagtccaggccagcagcagcttctccacaaagttttccatcatctgagggctgtggtggggggagggggccaagcgcagtagctcctcaccacgaggcacagttgggtagttgatggcctgcacatagatgctgtgcttggagagcagaagatcacagatcttgctgttgagtgctgcattacccaccctgatggggatgatgtggctgggacaggggataacaggaaagcccctgtccattagcagctggcgcatgtgtttgacattgcgctggtgt

SEQ ID NO: 2914 - DNA, 553 bp, Mus musculus
gatggtgccatctgtcctctggaggaattgtgtgatgtggcccaccagtatggagccctgaccttcgtagatgaagtccatgctgtaggactgtatggagcccggggtgcgggtatcggggagcgtgatggaattatgcacaagcttgacatcatctctggaactcttggcaaggcctttggttgcgtcggtggctatatagccagcactcgggacttggtggacatggtgcgctcctacgctgcaggcttcatctttaccacttcactgcctcccatggtgctctctggggctctagaatctgtgcgcctactcaagggagaggagggtcaagccctgaggcgggcacaccagcgcaatgtcaaacacatgcgccagctgctaatggacaggggctttcctgttatcccctgtcccagccacatcatccccatcagggtgggtaatgcagcactcaacagcaagatctgtgatcttctgctctccaagcacagcatctatgtgcaggccatcaactacccaactgtgcctcgtggtgaggagctactgcgct

SEQ ID NO: 2915 - DNA, 690 bp, Mus musculus
  misc_feature (1)..(690): n is g, c, a or t
aatgacaaggtagtcagcccttggggccactttattaacaataacgcatggcacagtggacaatgttagccagctgagcccaggaggctgctgagaaatggcgtgtgtcctcgcatccttccccagctcctgggaaggctgcctcacgaaggcaagcaggactgggcagcctgaccagaggggcagccacatgtcaaggcaataagagcacttggagtctggggccccgggctggggccgntaagtgggacagctgggtagctggtgacaggcatgccctcagctgttcttatgcgctcgctcttcaacgtagagctgcatctttaaaatgtccgacgtcatggtttttaggggtatcaagcgggggtcgtgcatgtggacatcctgttcatctgccaggatccatgggaagtccttgatgacctgtatcttctccatgtttcgagtagcagcttctcttgtgtgcacgaggactgtaaatgtgcagcctggagggttgtgatccaggacagcatcacacacactaatcttaaggatgaaggctcgaagcagctgctccacatgagacaggagggagtctgaattgatggacagcaagggaggctgagtgatctcaaagacaaacttctccactgggcggtgttccttatccaaaatcaccaccaccaccttctccacatcgttcttctc

SEQ ID NO: 2916 - DNA, 538 bp, Mus musculus
tccggctgctcagggggcggggcttcccccgaccgggctgcgtttcccgcgtgcggggtcggttgccttgagtccctacagacaccctccacgccctcccccaggcggccaaggatgaccaccctcacgcgccaagacctcaactttggccaagtggtggctgacgtgctctccgagttcctggaggtggccgtgcacctgattctctatgtgcgcgaggtctacccggtgggcatcttccagaagcgcaagaggtacaacgtgccggttcagatgtcctgtcacccggagctgaaccagtacatccaggacacactccactgcgtcaaaccctctctggagaagaacgatgtggagaaggtggtggggggtgaattttggataaggaacaccgcccagtggagaagtttgtctttgagatcactcagcctcccttgctgtccatcaattcagactccctcctgtctcatgtggagcagctgcttcgagccttcatccttaagattagtgtgtgtgatgctgtcctggatcacaaccc

SEQ ID NO: 2917 - DNA, 646 bp, Mus musculus
cgagacagagacttttatcacatgacaagaggttcaaaccataaggaagcttgcacagtgaccccacaaacctcagacgggccatccggtcccacgtcttccccctcagcacagcttagcacccaaggttctgataggtacagctctcaggcccctccctccggttccaccaatgttccatccccattaggtgcccagtgtcgcctcagcgaagcttcatgtgccagccatgactgcaccgtccagctgaggcggctcgtgcgtgtggaacttgacctcctcctgggagagcgccggagcgcggaggcctgcccgaggcagccctgcagctttaggaagtgagcttcgagtagctgggtggggagaaccgtctccgcagtacttgaggacatagagggggagacagctgaccaaggtgatgacggacaccttccagaggaatgacagggtggcaatgaagtagacatcgatgaactcatggaggaacaccagggaggcaatgtagcaggccgggctgagtagctcggccactgtcatgagccagtgccacgtctggatggtgagcgccaccatcagtagctcagtgaggatgagggatgtgaaggagattgccacgatgtgtacaaactccgactcgaacagcagc

SEQ ID NO: 2918 - DNA, 570 bp, Mus musculus
tgaatacttccgaccccagaagtaagattggcctgttcgacctggaggtgaactgcctcaccaagatcctgtttggtgcgctggtggtggtgtcgctggtcatggtggccctgcagcactttgccggccgttggtacctgcagatcatccgcttcctgctcctgttttccaacatcattcctatcagcttgcgtgtgaacttggacatgggcaagatcgtgtacagctgggtgatccgcagggattccaaaatccccgggaccgtggttcgttccagcacaattcctgagcagctgggcaggatttcgtacttgctcacagacaagacgggaaccctgacccagaatgagatggtgttcaagcggctgcacctgggtacggtggcctacggcctggactccatggacgaagtgcagagtcacatcttcagcatttacacccagcaatcccaggatccacctgctcagaagggccccacggtcaccaccaaggttcggaggaccatgagcagccgtgtccacgaggctgtgaaggccattgcactctgccacaacgtgacacccgtgtacg

SEQ ID NO: 2919 - DNA, 561 bp, Mus musculus
acatcagagcaaaaatacagagtatttattcatttcttcccactagagggacacactgttcttggacagacaaatgaatcatcagttgtcaggagttgcctttggagaatgatcaatgaactccttttcaggggttggaaattgataccagggtccatcacctcgggcacgcatcagccttcgaacttcctgctcctttaaccgtaactcagccttttcagattcaatctggaggatagccagggttttctcgtagttcttttcagggccatcatagaaattccgggcgatccatcttgatatcggatgcttgtaatactcccagtgttcagggatgtagccttctgggatttctgcaagctcggcttcaccaataaatatgttcaccagtgttatgccaattataactgggatcccagtcaacataaggtagaatttcattaacctcaagaagcgagcgtcatagtataaagaaggcttgacgacaaacagtctcttgccatggtccccactgtgccgcacaggagcgacagtcttcggaaagctccgcgggatagtcga

SEQ ID NO: 2920 - DNA, 574 bp, Mus musculus
gcggagctttccgaagactgtcgctcctgtgcggcacagtggggaccatggcaagagactgtttgtcgtcaagccttctttatactatgacgctcgcttcttgaggttaatgaaattctaccttatgttgactgggatcccagttataattggcataacactggtgaacatatttattggtgaagccgagcttgcagaaatcccagaaggctacatccctgaacactgggagtattacaagcatccgatatcaagatggatcgcccggaatttctatgatggccctgaaaagaactacgagaaaaccctggctatcctccagattgaatctgaaaaggctgagttacggttaaaggagcaggaagttcgaaggctgatgcgtgcccgaggtgatggaccctggtatcaatttccaacccctgaaaaggagttcattgatcattctccaaaggcaactcctgacaactgatgattcatttgtctgtccaagaacagtgtgtccctctagtgggaagaaatgaataaatactctgtatttttgctctgatgtaaaaaaaaaaaaaaaaaaaaaggg

SEQ ID NO: 2921 - DNA, 475 bp, Mus musculus
catgttccctcctgcctggactcagcactcagagtccgaaggaagcagcaagtagagagagtttattttctcctgggcccgaccgctgtgcagggggagcacagagcaggcgtaggcactagggtgtgtggacctgccatggcctggagttcatctggctgcctgggaggtaactgtgtgagtgtgtaaagggtgtgtagggacaggtgtgatcctcccagaactaagacagggcccttgggacatggaagcagcaggagtgctaggcttggcacacagacaggatgaaggtaacagatggcgtggattgggtgtgctagggtggggtgacccttcagtagaacaagctagcttgtctcagagccaggggtaactcagggtgcagcaaggtgtggcatgttgagctctggctgctgattgggaagctgggtacagaacagggagacgaaaggcctctgggtatcaggacatgacc

SEQ ID NO: 2922 - DNA, 584 bp, Mus musculus
gagctgctggcggcggcggcggtggcggtggaggcatgggactgggaggaggtggcggaggcggtggaactgccatgcgcatcctgggcggagtcattagcgccatcagcgaggctgctgcgcagtacaacccggagcctccgcctccacgtagtcattactccaatattgaggccaacgagagtgaagaagtccgtcagttcaggaaactttttgtccagctggctggagacgacatggaggtcagcgccacagaactcatgaatatcctcaacaaggtcgtgacccgacacccggatctgaaaactgatggttttggcattgacacttgtcggagcatggtggccgtcatggatagcgacaccacaggcaagctgggctttgaggagttcaaatacctctggaacaacattaaaaagtggcaggctatatacaaacgctttgatactgaccgatcagggactatcggtagccatgaacttccaggggcctttgaggcagcaggattccacctgaatgagcatctctacagcatgatcatccggcgctacgcagatgagagcgggaacatggatttcgataac

SEQ ID NO: 2923 - DNA, 268 bp, Mus musculus
accccaaagggtttattgggaccttttttttcacatacaagttggggcaaaaaggaaggggcttatgaacaggaccctgaaggggacccgagggcataaggtggggcccaaataaaggggcacctaactaggggccaaactgtggatccaggtggtctctgccagtctatcccacagtgataacgtggggtgggcgccattaaaatccccttcctttataccggtataccgcggactaggggcacagggcccactccaccctctctct

SEQ ID NO: 2924 - DNA, 545 bp, Mus musculus
tccgctcacactacgatggcatccgctccctggccttccaccacagccagtcagcactgcttactgcctctgaggatggcacactcaaactgtggaacctgcagaaggcagttacggccaagaaaaatgctgcactgtatgtggagccggttcatgctttccgagctcacaggggcccggtgctggcagtcaccatgggcagcaacagcgagtactgttacagtggtggggctgatgccaggatccacagctggaagattcctgacctcaacatggacccatatgatggctatgacccaagtgtgctgagccatgtcctggaaggccatggggatgctgtgtggggtctggccttcagtcccacctcccagcgcctagcatcctgctctgccgatggcaccgtccgcatctgggatcccagcagcagtggtccaagctgcctctgtaccttccccatggatggagaacatggaattcccacctcagtggccttcaccagcactgaacctgcccatgtcgtggcctcctttcgttctggtgatacc

SEQ ID NO: 2925 - DNA, 680 bp, Mus musculus
acacatgaggagcgcgagtatttttatttctttaacttaaccatgcaaaacgtgttgactgactcatattcgcatgtaactcttttctcacatccgtcactgagggtgaatccagaggaaggactgtgatcatcacatgaagctgactgtattatttccaaagtttattccaatccatttcttctttatatccaaacatcttcattgtgtgtttggatgagataaatccacatgaaaaccgaggcgcccacggacagtccaactgccaaccagttaggtttggcattgactggctcccggacatagaacttcgaccgtgttgaagagcagctcggcagccgggcgggggccagcagccgcgaaaacgagcgcagactacggacggcgccggatagtcgaggccatttttttttctttggcgttttttttgcattttttaatcggctattgcgctttttttttttttttttttttttttttcaggtggttttttttgtaacagatttttgggcaaatttttttttcttatactcttgtctttaatttttttttttttgggcccttttttttttccagattgtgaaatccctttttatggtgtaaaggcgggattaaaagtgtttttttttttttttattttttttttttgttttttttttagttttttttttttttttttt

SEQ ID NO: 2926 - DNA, 439 bp, Mus musculus
gcgccgtccgtagtgctgcgctcgttttcgcggctgctggcccccgcccggctgccgagctgctcttcaacacggtcgaagttctatgtccgggagccagtcaatgccaaacctaactggttggcagttggactgttcgtgggcgcctcggttttcatgtggatttatctcatccaaacacacaatgaagatgttttggagtataaaagaagaaatggattggaataaactttggaaataatacagtcagcttcatgtgatgatcacagtccttcctctggattcaccctcagtgacggatgtgagaaaagagttacatgcgaatatgagtcagtcaacacgttttgcatggttaagttaaagaaataaaaatactcgcgctcctcatgtgtaaaaaaaaaaaaaaaaaaaaaaaaccaaaaaaaaaagggcggccgca

SEQ ID NO: 2927 - DNA, 598 bp, Mus musculus
aaaagtgcaaagtctaatgctacgaaaggcatcaacacggcacaagaacgctcacggcgaacatcagaaacaaaccagaacatgtcatgaaatcagcagaaacaggcactttacatattgataccaccgcacaggaagcaaacaggcagggcgggatagactgcagggtctcgttggctggtccaggccagcatccaaggaagaacatcactgcacaacacgaaaatgccctcagaaggggcaggctgactcctgtgtgtcctcccagtctgtcttaaaaggactggccaggtcctggtgtaggggcttgggtagggagagtctgagggggagtccttaaccgtttctttggggtttctgatggttaggacagggttggagcaaagaggcttttggaagcattttacaaaaggaacattcacaggctaccagacttcagagtctgagtttgtgtgtgagcatatgcgtgcatgtatggataatatacatttgtgtccttgggacagcttattttttaagacgcaagcagaaggaagagtggctgtctatattgttagttataaagctctgcctgtcttaacccccatcctattggcat

SEQ ID NO: 2928 - DNA, 601 bp, Mus musculus
tttgatccttgctacaggcaggagtggagcacagacttgttaccaggtctctctggcactgtcacatgcagcagacaggcagcattaagggtaccctagctctgttagggcagagcctgggaatgtgcattttgcttaaactcttgaaggttgttgtaagactgtgtagccggcctaccaggtccttttcatcctgagagtgacatgtccctcgttttctgcagtggccacctctctctctggcccttgcaaatgcttcccatccctcctgcatctggtatggactttcaggaccctggtctccctcgggtctaagaatcaccctccaaccagtggttcatttttctaggagtcccagtcagccccatgaatccacagacttcagcgaatggaagccctccctgagccgtgtttccggcttcaaccaagtcattgctgccttcctctcccctgtctctacacacaccctcagtggggtctgtgaggtctcatgctgggggcagggatctgtggtgaggggtgcttggcagtccttgttgccactctcaagcttcccaagccattcttcacccctttccaagcaagcttcaagcatccaggc

SEQ ID NO: 2929 - DNA, 693 bp, Mus musculus
  misc_feature (1)..(700): n is g, c, a or t
ggttttatgtaacatgtttaatgtacaaagatttgtaggtatctttgggccttcacaaaacagaacagggcttgttatatctaaaaggatttgtaagtaaaatcaacaattcagaaaccaaaatggaagcatcaaactacattgtgatatgatgcgatnntgtagtaaatactagtgcctgcatgtaagagctctcgatgtaatcttgatgtccacccgagacaaggagtcagatgaaaatatttaaattacccacagggatattcaggaaaagtgtgatgtgtgcgctgctcctggaagggctgggttatgacagagcagggacactggtcacaggcacacccactgagaagggggtacttcctaaaattagtgtccagcagccttccatagacacaattaatttgcttcagcaaacccttcagcttgacctgtcaccttaaatttctggacatattaatgaaattttactgcaaaagtagaaaaaagttctagcatcacccacaccacaagaaaacactgagcaaggaagcttcagtttggtactgcacggtatcgcaacagcacaatgctcactaacagtgctgggagcagagcctggggccactggttcctacacttacttgaaacacaacacttcacaatgaaacagtagaaccacaacttagtaggaggcactaaagtttcttctga

SEQ ID NO: 2930 - DNA, 601 bp, Mus musculus
gaggaggaagaacatggcgggcgcagcagggccagggtccggtccgggggcagcgggtggagatggagacgattcgctctacccgatcgcggttttaatcgacgagctccgcaatgaggacgtgcagctccgtcttatcagtattaagaagttatcaactatagctctagcactcggggtagaaaggactcgaacggaactgctgcctttccttacagatactatttatgatgaagatgaggtgctgttagctctcgccgagcagctgggaaatttcactggtttggtgggcggtcctgactttgcccactgtctgctgcctcctttggaaagtttggctacggtggaggagactgtcgttcgagacaaggctgtggagtcgctgaggcagatctcgcaggagcacactcctgttgcccttgaagctcattttgtgcctctggtgaagcgcctggcaagcggggactggttcacgtcgcgcacgtctgcatgtggcttgttcagcgtttgctatcccagagcttcaaatgctgtcaaggcagagattcgacagcacttccgttctctctgctcggatgatacaccaatggtgcgacgtgct

SEQ ID NO: 2931 - DNA, 538 bp, Mus musculus
gatgcacaagtgaatgacaaacacttttatttcaaaaaccaggatttgtacataacactctctgagaaaataattaagatagtttaatcaaacaaaccctatgttttaaacataataagaatatatagaagggttcaaatgagaatttactcaaacctttaaacacaattcaattcagttggctggtttaaggaggtgatttctgtctttcacagaacaagaggcttttcttagatttatttattattttttattacattccacaatctcaatatatgctataagtgctataaaggtatattctttaatgtggaatatatgttatgcatcaattaattctttgagggttatatgtaccataaaatatgcctttcttttcaaaaccaacagaaaacccgctaacactaacagaaaagggaaaagaaccacccaagagccctagctagtgtgagtagcatcgacagtctcagatccaaacagattctgccccagaaaaagtatttagctccactccctaatacaagacacccgaacaaag

SEQ ID NO: 2932 - DNA, 605 bp, Mus musculus
aaaaacgaatatttcactaacttacaaaggtcacaggatctcaagaatagaatttcataccctgctaaacactgccatacactaagttcataaacagagatgacagattccagaaaaaaaaaaactggaaatgcacattttcaggaaataggaaaggcggtatctatgtgcattcagtatttcaaacatcacatgtgtattttctcactctccatcatgtgtgtatcgtgtgtatttgatgtggagagtgataatcaagattttgtaatagaagaaaaaagtgttttgctttgaatgggttatgtggttgttgcctttctagggctctcttatcaggagttcagtgtagacagtctcctgaaagcaaaaatgtaaaacagtgagcactgtggagccacacatccatttcccactttgttcgggtgtcttgtattagggagtggagctaaatactttttctggggcagaatctgtttggatctgagactgtcgatgctactcacactagctagggctcttgggtggttcttttcccttttctgttagtgttagcgggttttctgttggttttgaaaagaaaggcatattttatggtacatataacc

SEQ ID NO: 2933 - DNA, 293 bp, Mus musculus
gattattcagttgctttattgacttgacattgctttccatgctaatgggcatcactgcactgttgacggaaactcacactgagtgggaaggcaatctccaattagaatctggcaacacaagccccacctggcacatggcatggaaatttcacatggctcaccacaaacgggtcattaagggcatgtcaggaaaatgcaaggcccagggctacaccgggagtcacagtatggatctcaggggggagtgacggtagtgaacgcttggggctgatttcgtcatcgtgatcgtggtg

SEQ ID NO: 2934 - DNA, 599 bp, Mus musculus
gagcgtctggccagcagctcggagctcctctgcgcgcggcgggctggcagcgggcccgaggcgagcgggacagattgactggaagccgagagtccaggcggcagcgggaattgacaggaggactacgccgcaaggtttaggcccagaatagcaaccaggaaacaaaatctcatcatggccaatgtccaccaggaaaacgaagagatggagcagcccctgcagaatggacaggaagaccgccctgtgggaggaggtgagggccaccagcctgctgcaaacaacaacaacaacaaccacaaccataaccacaaccaccaccgaagaggccaggctcgccgacttgcccctaacttccgatgggccattcccaacaggcagatgaatgacgggttgggtggagatggagatgatatggaaatgttcatggaggagatgagagagatccggagaaagcttagggagctacagctgagaaattgtctacgcatccttatgggggagctgtctaaccaccacgatcaccatgatgaattctgccttatgccttgacttcggtcattcccccctgagatccatactgtgactcccgctgtagccct

SEQ ID NO: 2935 - DNA, 502 bp, Mus musculus
ggcaggtgacccaaagcttttatttcactgataggtccacaggctggcgggtaatccctacagggccacctcagggcccacctctccttctccctggccttgggctacccgtgcttccttcagtgcccttcgcttcttcctttggagcagtcgccgctcacgttcaaactccttcatgcgtttcacgtaatccaggtgctcgcagtagtcccagtcgtgctgctcgtgcttgcaggccaggaagttggggaagctgtctcgcttgcacttcagcagccggatgaggtagtgggcacagtagtcacgttgctgcagtgtcagctgggcatccatcatctcttgttgtgtggccaccatcactcgctccttgcgctccggaaagccgaggtccggcgagaagctgggtatcttctcggggtcaggctccaccgaggcatcccacagatagcgccgggtcaggtgcgcccccatggctactctgccttacccttcggatagtcga

SEQ ID NO: 2936 - DNA, 524 bp, Mus musculus
aagggtaaggcagagtagccatgggggcgcacctgacccggcgctatctgtgggatgcctcggtggagcctgaccccgagaagatacccagcttcccgccggacctcggctttccggagcgcaaggagcgagtgatggtggccacacaacaagagatgatggatgcccagctgacactgcagcaacgtgactactgtgcccactacctcatccggctgctgaagtgcaagcgagacagcttccccaacttcctggcctgcaagcacgagcagcacgactgggactactgcgagcacctggattacgtgaaacgcatgaaggagtttgaacgtgagcggcgactgctccaaaggaagaagcgaagggcactgaaggaagcacgggtagcccaaggccagggagaaggagaggtgggccctgaggtggccctgtagggattacccgccagcctgtggacctatcagtgaaataaaagctttgggtcacctgccaaaaaaaaaaaaaaaaaaaaaagggcggccgcc

SEQ ID NO: 2937 - DNA, 507 bp, Mus musculus
aactattaaatttgtttagtaaagacaattttgctcatacaaaacgagagtttacaacagtctgagtgttgaacacaccatcaaagacatgggaggagctgcagacatctgggccctgccccaggcccagggatgcccaagagcccctcctccaccaacccctgagggagacacccctcctccagcaggaggggcatgggggaccatggcacaaagactcttccccgcctgctcctcctcaatcctggggagcccccacccaggttgagtagttagagggtaaggtggctagtgggcagggacagagtcaagacatctttggtgcgaagactgtcccatccaccagaccacatggtggaaatccaggaagaccacacgtggtcctgcccttgtcgaagggaggttggcaggtacccagagatcaggggagatgcatgaaatgaaactgcctttccaggcatagaaccttcccagggtcaccgtgggagttgacagcccattgagaaa

SEQ ID NO: 2938 - DNA, 574 bp, Mus musculus
atgtggtccttgggtgtcatcatgtatattttgctgtgtgggtatccccccttctattccaatcacggccttgccatctctccgggcatgaagactcgtattcgaatgggccagtatgaatttcctaacccggattggtcagaagtatcagaagaagtgaagatgcttatccggaatctgctaaaaacagagcccacccagagaatgaccatcacagaattcatgaaccacccctggatcatgcaatctacgaaggtccctcagactccactgcacaccagccgtgtcctgaaggaggacaaggaacgatgggaggatgtcaaggaggagatgaccagtgccttggccacgatgcgtgttgactatgagcagatcaagataaagaagatagaagacgcatccaaccctctgcttctcaagaggcggaagaaagctcgtgctgtggaggatgcggctctcgcccactgagccgctctgtctcccacccactggaggacaagcaataactctacatgaatatattttttagacaaagagacacaagttgcccaatgctgcctcctgttctcttggg

SEQ ID NO: 2939 - DNA, 806 bp, Mus musculus
gaaaaaggcctttccttcccaaagcacagtgctagtgaggggggttgggagctggttagattatactagtaagagcagagataattagagtcataagaaataagctgtcacacaaagagaccaccccttcactcagaagagaaactgagctgactaatagcagtagccctccccagcagcaacctaacctggcatccactgtgaccagcgacaaaggacctgctgtatgctgtggccttggagtggcctctctgcagcacagtggcctacagggcagagtaagtagacctcatgcccgagagtcaggggaatagcagccaccacccttgctggcctctcagcagggaggcagcgcactgagcaagccagaatccctctcttaccccgagagctggtccctccaggtcagggttgggacacagtggcacggggtggctgggggtggcttgcactgccgctgcccgtgctgtatctgttctgtggataaacagaggagctaagtctccaggccagttgcctcacatgaactgaaggtactaagttcaaatgaatgcttccagggaaaataaaaacctcaacaaaggcttttgttgttgttgttgttttggctagtgctagcttttatgtttaaaaataacaaacaaacgaataagaataaaaagaataagaaaaaagaagaaaacagcacgaaaacaaaataagaaacaatcccaatcgtgaccatgtcttgactgtgatgttggcacacatgcagaccagccgcacgtacccaagcacgatgccacctggaggctagcagaccccct

SEQ ID NO: 2940 - DNA, 598 bp, Mus musculus
agaaatggactctggagcgcctcaaaaggaaataccggaaccagaagttcaagtgcggcgaggataatgacggctactcggttaagatgaagatgaagtactacatcgagtacatggagagcacccgcgatgactgttccctttacatcttcgatagcagctatggcgaacaccccaaaagaaggaaacttttggaagactacaaggtgcccaagtttttcacagatgatcttttccaatacgcgggggagaaacgcagacccccttacaggtggtttgtgatggggccaccgcgttctggaactgggattcacatcgaccctctggggaccagtgcctggaatgccttagttcagggtcacaagcggtggtgcctcttcccaacaaacacacccagagaactcatcaaggtgacccgagaagaaggagggaaccaacaggatgaagcaattacctggtttaatgtcatctatccccggacacagcttccaacctggccacctgaattcaaacccctggagatattacagaaaccaggagaaactgtctttgtaccagggggctggtggcatgttgtcctcaaccttgacaccaccat

SEQ ID NO: 2941 - DNA, 646 bp, Mus musculus
cggtcatggtgacattttggctttctatcctcagaaggactggcacaagttaatggggaagaggaaggtaccgcagaacggagctaacccgtcactgtgtcctacacctgacagtttctttttctccaaatgaaggagcagaagagggtcagccagagccttcttgtctttattgtaaagtcatgcatttctatcggaggcaaacacaatgccacaaagatcactctcgtattgcttggaggacagtggcagagtggcagattcagacgagtccttttgcccagaagcttctgggctgtgcgcatggactcaggacagctcaagatctgtataaaccagtctggaggtcagcacagacagcagctgctctttccccaggcaatgagctggttcggaccttgggcccaggctatacctacctgtggtgtgctggtccagcagacagcaggaccagaggtacccggcgactcttggcaaacacctttcttgggctcctttagaaaggccccaatgaggcaagaaacatacttatctggcaccatgtgatccctggagggaaccacagtctctggttaaacccacaaaacatctccatctttccaagacccactgttttttcccacagaaattatgcgagaagagacac

SEQ ID NO: 2942 - DNA, 583 bp, Mus musculus
gcgatttctgaatggcttcttggccggggctgtagtgggcgccgcgggagcggggctgacggcgctgcagtttttccggcgtccggacgcggaatccgcgaagctggcgaggcagccacacggtgcagcacagtgcctggtacagaattggccttcaaatctgcagaagaagctgtcttggaacagtttgggtttcctttagctggaacagagacgaggcgttacactaaccacgccctgtcttacgatcaggcaaaacgggtgcccagatgggttcttgagcatatatccaaggacaagatcatcggtgacgctgacagaaagcattgtaaattcaagccggatccttctgtcccttcagccttcagcgccctcaatgaagactatatcgggagtggctggtcacgaggccacatggccccggcaggaaataacaagttttccagtgaagccatggcagaaaccttttacctttctaatatcgtgcctcagaattttgataataactccggctactggaacagaatagaaatgtattgtcgtgagctgacggagagatttgaagatgtttggatagtatcag

SEQ ID NO: 2943 - DNA, 461 bp, Mus musculus
ctgtgtaagcaagagagctgtattttccatttgctatggatcgggtcctgactggcaggtggagtggacagtcccaagaaggaacagctctacccttcaagtagagtaggaggtctcgagagacagtaggggttggctgagctcagaccctcacttggctgggcagatgagagatttactgaagtagatttgttctgtgcttttctgaaaaaggagaacagaggagcagatttccacatctctccctttggttcagggaagaaggtatcccagcatggcgaacacactagtggcaggccatggagaccggaagcttcgagagaggtgtcaggaaggcctggagcaggtgggcatatgactctgtatgaggatggatggcttcatcttgggggtcctgatggcccctgggaacataagggcctcccaaataggatttggcctatgaacatccgcccatcccc

SEQ ID NO: 2944 - DNA, 581 bp, Mus musculus
cactggtgtccacagcaacgctcctggcccccaactgtcatccctggctgctgggccccagatgcaatgcaggccatcaagtgtgtggtggtgggtgatggagccgtgggcaagacgtgtcttctcatcagctactccaccaacgccttccctggagaatacatccccactgtatttgacaactactcagccaatgtgatggtggacagtaagccggtgaacctggggctgtgggataccgcaggtcaggaggactatgaccgcctccggccactctcctacccacagacagatgtatttctcatctgcttctcgctagtcagcccagcctcctatgagaatgtccgtgccaagtggttccctgaggtacggcaccactgccccagcacccccatcatcctggtgggtaccaagctggaccttcgcgatgacaaggacaccatcgagaagctgaaggagaagaagctggctcccatcacctacccgcagggcctggcactggccaaggatattgattcagtcaagtacttggaatgttctgcactcacccagcgaggcctgaagaccgtcttcgatgaggc

SEQ ID NO: 2945 - DNA, 792 bp, Mus musculus
gatttatgaaaagttttatttatcagtactgtgaagaattctcatcataattgctacgttaatcaaggaaaaggcacagagaagcatgtgtcgtttgagtcctcgaaactggacctcccagcccatgctccctatgaggagtctagctgctgtggtggtcttcacagctttggttttctggagacgaagctcatgattgcgttcatgcactcctctgacagccaccttgcttgcagagtagtgcactcttcagcgttgactgcgtagagcttttctttctcattttttctgattaactctttggaaattctcatggcgtttggcgggacttcgcatatgttttcagcctggtccagacttctgtctcaaaagtgctctcagggaaaacttcagtgacaaggccttgagcccaggcctctcttgctgtcagcttcttcccaaagagaagcatctcagctgcctttgctgagcccatcatcttcggaaacgtgtaagaggagcatgcttccgggctctggccgagttggctgaatggagtatgaaacgttgccctgtctgatgcaaagacagcatcaaatagtcccagaagggtgacagagattcccacagctgggccatttactaccgcaaccagaggcttgggaaagtctataaaactgtttacaaagtccctcagtaacacagcaccgttgctagctgcctcctctatcccccccagtggcactagtgaagttagtcaggtcatttccactgcagtagtagtcaccagttcctgtgaaaacagccatgaca

SEQ ID NO: 2946 - DNA, 611 bp, Mus musculus
cctccgggctcagtttgaccacagtatctagctatggcggcagtgacctggagtcgggctcgatgctggtgtccgaggtaagcttgcagcctcgactctccggcccaaagtcgccagcgggaattttcgcccgcccacggagccgcccgctttgtcatctggcctggctagcgagacagcaggatattactttgacgatttcccagcgagagagctctaaagagtgacctcgaaggttcttcctctgctgagtcccaaaggtgtcctgcaggtcttcagattacaagtggctaaactgcacttgggcagaccaacaatgagagccagtcagcaggactttgaaaatgcattgaaccaggtgaaactcttgaagaaggacccgggaaacgaagtgaagctaagactctatgcactgtacaagcaggccacagaaggaccctgtaatatgcctaagcctggtatgcttgactttgtcaacaaagccaagtgggatgcatggaatgccctgggcagcctacccaaggaaactgccaggcagaactatgtggatctcgtatccagtttgagttcctcatctgaagccccgagccagggaaagcgtggagctgatg

SEQ ID NO: 2947 - DNA, 581 bp, Mus musculus
agattatttaaaatacaactttattctgattctaaacgaaaagaatgggaatgacagtaacaaacaagatttccccactggatattgcgatgggactgcagcagtcttatctttgaaattcagaaaggaaacaactctgttccaaacagctaaatatgcaagtccaaaaaatgaaggtatgtttaactgccacattcactcgaagcccattcatctccttcagcatcccaatgaagtacacgatctgcttagctaaataaggtggcacacgcgctgcaccgctgacatcacaggacagttgcctataaaactagacttctgacgcagggctccagcttcactttctcacaggtcatcatcctcatctgggagagcagtcgtctgagcaacctctaaatcatgctcgtactgtgctgccaaagctgggtccatgaccacctcaggtggggcaagagcaggcatggcaacaaactccaagttaggatctccaatgagctttctggcaagccagaggaaaggcttttcagagttgtagttacttttggcagaaatgtcatagtactgaagattcttcttccggt

SEQ ID NO: 2948 - DNA, 650 bp, Mus musculus
ccagctccagtcggacaggcgcggagactcttctggaaggatccgccgcgatggccgcccagggagagccgcaggtccagttcaagctcgtcctggtgggcgacggcggcaccgggaagacaaccttcgtgaagcgccacttgacgggcgagtttgagaagaagtatgtagccaccctgggcgtggaggtgcacccgctcgtcttccataccaacagaggacccatcaagttcaacgtgtgggacacggccggccaggagaagttcgggggcctgcgcgatggctactacatccaagcccagtgtgccattataatgtttgatgtaacctcaagagttacttacaagaatgtacctaactggcatagagatctggtacgagtgtgtgaaaacatccccattgtattgtgtggcaacaaagtggatattaaagacaggaaagtgaaggcaaaatctattgtcttccaccggaagaagaatcttcagtactatgacatttctgccaaaagtaactacaactttgaaaagcctttcctctggcttgccagaaagctcattggagatcctaacttggagtttgttgccatgcctgctcttgccccacctgaggtggtcatggacccagctttggcagcacagtacgagcatgat

SEQ ID NO: 2949 - DNA, 618 bp, Mus musculus
acaattagttcatggtttttattaccctggctgtttacagaaaagtattttccactgttaatttaggcataagaatagctgttttatctcatgaccttttttagaagttttaaaaaatgaaaaagaaaaattgcatctgagaagatcttcgtatcagtggttttaaaaaaagatgagcgagagagagagtggcttctgttttgtccatcagtaactccgaccaaacaaggtgtagaacttggcaggattcttgccacagacacacatggctccgggctgcagctcacacagagggttgaaaggaatgcaaaggcttttggctcccatggatggagcaccaggttccacatcttgatccctggcagtcatctttttgatccagtcctcacagtcaatttccccacaaaatggaatctgtgcaactttccagcatctagcaccttctggaagtcctccagtgtattagacacaaccatgtgggttttaaggtcttcagaagcccttgtgaaaaggttcagctggatgtcttccaaaaccttttccagcttagcctcagcctccttctcagcaattgtcagtttctctccagtatctcgtctgactgctacaaactgacag

SEQ ID NO: 2950 - DNA, 632 bp, Mus musculus
ccaattgccattcgtcctactagtgaaacagtgatgtatccggcatatgctaaatgggtgcagtcccacagagacctgcccgtcaggctcaaccagtggtgcaatgtggtgcgctgggagttcaaacacccacagcctttcctccgaactcgggagttcctgtggcaggaggggcacagcgcctttgccacctttgaggaagcagctgatgaggttttacagatccttgagttatatgctcgagtatatgaagagctcttagccattcctgttgtgagaggaaggaagactgaaaaggagaagtttgcaggaggagactacacaaccacaatagaagccttcatatctgccagcggacgcgccattcagggagcaacatcacaccatttaggccagaatttctccaaaatgtgtgaaatagtttttgaagatcccaagacaccaggagaaaagcagtttgcataccagtgctcctggggcctgacaacacgaaccatcggtgtgatggtcatggtccatggggacaacatgggcctagtgcttccaccccgagtagcatctgtccaggtggtagtcattccctgtggaatcacaaatgccctgtctgaagaagacagagaggcactgatggc

SEQ ID NO: 2951 - DNA, 403 bp, Mus musculus
ccgcccttgtttttttgtattaaaaatggtttcttgtaaatatttatattttgccatatgtttagagtctagaaagatgcatggtagtaatagataattattagtgaattatgtttcttcgacatccgtttcggctgtcaaatcagccagccgcctctatgcccagccacctgtccagcacagctcccgaccatggtctacgtggctctgctctgtagcagctcggtgtaccctgatacccgtgcccattagtgtacagatgatattacaaggcaaaaagatgtgatctcaagaaaaaaaaaccacaatgggcggtagcatcctgatccagtgttgcaggaccatgagagatgagctagtgctgtgtgtccaaaccctgcttcatttttgtctttaggtgtgg

SEQ ID NO: 2952 - DNA, 678 bp, Mus musculus
gccaccctagaagtggatggcacaaagggccagagtgaagtgagcactgcccagctgcaggagcgactggacacacttaagacacatctgcaaggctctgtgcacacctatgttggaggcctgccagaagtatcggtgatttctgcacccgtcactgcgttctaccgcggatgcatgactctggaggtaaacgggaaaatcctggacctggatacggcctcgtacaagcacagtgacatcacctcccactcctgcccgcctgtggagcatgccaccccctagaccgagctgcaagagggctccacacctaaagacaaaaatgaagcagggtttggacacacagcactggctcctctcgcatggtcctgcaacactggagcaggtgggctaccgcccttgtggtttttttttcttgagatctttctttttgccttgtaacatatctgtacataatgggacgggtgtcgggtcaccggctgctcagagagagccacgtgacctggtgggagctggctggaaggggctgggctagaggggctggcagtttgcagcagaacggatgcgaagcaaataactctctattatcgttattactacatgcttatttctgactctaaaatatggaataaaaaatatttacagaaacctttttaaaaacaaaaatagggcggcccgctt

SEQ ID NO: 2953 - DNA, 634 bp, Mus musculus
gcatttcagatgtgaaacttttatttcttttcatgcctaagtaagcctgggtgactgatggctgagtctcattctttctgattgtgtcgctgtctcgaccttcagagccggaagaaacatttacttttacacaagagtgtagagagtgcctaagctttggcagctgacttataatgggtcagagtgcgggcagaagggtcagtagcattgatccacttaggcatccaataatgagtcggccaatcagcccggcctgggtaatggcgttcaaagatctgacggtagaagtagccttccttagttttgggagtattgaagggaaacttctgggaggctgcagacatcatctcatcatcaacctgatgttcaacatagtcctgcaaaatcttgaaccaggagttcttgactgaggtgatcccatcactgaaggcttctttgggtcgccagagaatctctttgggtagcaggttgcagtcctcaaaagtctctctcaggagatgtttttctatgccattttttggaattctcatatctggcggcagagacaggtaataggaagaaaaccgatgatccagaaaggggactctcagttcgagaccgtgtgcagcagtagtgcggtcggcccggagaacat

SEQ ID NO: 2954 - DNA, 653 bp, Mus musculus
ttttccttggaaacttatgatattacgacagttcgggcatctgtgggcatgtatttaatttccaagtatattcggaagaacacagacagcgtggtgatcttctccggagaggggtcagatgaacttacacagggctatatatatttccacaaggctccttcccctgagaaggccgaggaggagagtgagagactgctgaaggaactctacctgtttgatgttctccgggccgaccgcactactgctgcacacggtctcgaactgagagtcccctttctggatcatcggttttcttcctattacctgtctctgccgccagatatgagaattccaaaaaatggcatagaaaaacatctcctgagagagacttttgaggactgcaacctgctacccaaagagattctctggcgacccaaagaagccttcagtgatgggatcacctcagtcaagaactcctggttcaagattttgcaggactatgttgaacatcaggttgatgatgagatgatgtctgcagcctcccagaagtttcccttcaatactcccaaaactaaggaaggctacttctaccgtcagatctttgaacgccattacccaggccgggctgattggccgactcattattggatgcctaagtggatcaatgctactga

SEQ ID NO: 2955 - DNA, 499 bp, Mus musculus
aatagaccatagcaaatcctttattacaaataattaaatctctccacgtctcacacattatcaaacagcattctgtagtcccactagacagcataggaggcattcaatgttacaagtgaggacggagttaaacttgcaactcctgacccggtgtcctttccccacatcacccatctgtgtgccacaagcatctcatctcaaacctttgctgtttcaaattttaagtacaggaagttgagagagataaaatccagtgaaaacacattaacgtcaattcaacttaaaaaagaaaacaaagcaaatttaaattagttgttttcaggaaagagggaaaggatgcatggggttgagtcaaaactatggcagggttctttgctatacatggcgtactctggaaactatctgtcatatttgaaaataaagtagcttttgtggattttggtattgtaaacatgtggtttaatattacccaaatttaatttaaagcatctttccaaac

SEQ ID NO: 2956 - DNA, 219 bp, Mus musculus
ccacatctggcacagcggacagtttggcacaatcaataatttcagactgggtcgcttgcccagtgttcctgtggagtggaatgaaatcaatgctgcctggggccagacagtgctgctgatccatgcaaagaccacctgacgggtctgaagtttaagaggtaccgacttggtgcctatggaaatgattcctatctggaggctgtgacagacaaatctaag

SEQ ID NO: 2957 - DNA, 643 bp, Mus musculus
aaggagagaatgtccattggagtttatttacagacaaccttaggtgaggccttttcctctaggatctacatgcttttgaagttacttggtttcaggcttcttgtctccagcttcgagcttgagactctcaggaggctggcgataggcagggaaagcctcccaggggctgttcaggtcaaacttgcggaattcttgtgccagctccactggttcagccactacccgctttacctcatcgtcgtaacgaagctcaacatagccagtgaggggaaagtctttccggaaaggatgtccctcgaagccataatctgtcaggatccttcttaaatcagggtggttaaaaaagaaaactccaaacatgtcccagacctccctctcataccaattggccgcgatgtgcacagacactatagagtcaatgggtgtcagctcatctgcataggtcttcacacgaatcctagagttgaaccgcagagacagcaggttgtagacaatctcaaaacggttctgccgagttgggacatccactgccgtcaagtcagccaaggatttgaattgtgcattggtgtgatccctgagaaaagtcagcgttgggatgactccatcgggatggatacagatttctaactcatcaaggcaggac

SEQ ID NO: 2958 - DNA, 566 bp, Mus musculus
gcggcggctgcagccagggtctggtgtcgtgggctcttgggggccgcttccgcaggcaggggggctgggcgaccctccgtgctgtggcagcacgtaagaagggagagcgcggcggctgacaagcgccccactgtcatatcccggagtgatgtgacccacaagcagctctcagcatttggagagtatgtggctgaaatcttacccaagtatgtccaacaagttcaggtgtcctgccttgatgagttagaaatctgtatccatcccgatggagtcatcccaacgctgacttttctcagggatcacaccaatgcacaattcaaatccttggctgacttgacggcagtggatgtcccaactcggcagaaccgttttgagattgtctacaacctgctgtctctgcggttcaactctaggattcgtgtgaagacctatgcagatgagctgacacccattgactctatagtgtctgtgcacatcgcggccaattggtatgagagggaggtctgggacatgtttggagttttcttttttaaccaccctgatttaagaaggatcctgacagatta

SEQ ID NO: 2959 - DNA, 718 bp, Mus musculus
cagtttctagaggctttattttgacgtatacgaccagacacaagcgggcggatagcgctgggtgtacagaaaagggccggcttgggccaagcactcctctccaccacacagaagacctggggaaaatgcaagcgcgcctaagccgcagtggagccacgtatgcatccaggcgcaggtcttagggtgtgtagcttccaggaaagaggagcagataacaatttccagaattccaagtcttacatttcctccacagaagcaaaggaaatttccccaggttctcctttttcctcgttaaaatgtagtttttaaaatgagcacacacacacaaccaacttatatagctgtaaagttcaaagcagtttgcatctagggaacgtgcacgtggccagatgtgagcgaatgagcagcggatactgaacggatactgtccgagcccaggtcccttgcccctaggagagaatgaatccccacaccactgcacggcccacagctgagaggggtagaatcccaggcaaggacattgctctactggtcccttcctcttccagcagcacccatcccatttcactcccacccatctccccgggctggtatgggcttggcccgggaaatacaatggaaaggggtaatgtgagctcccaacccatgagtcctagttgcactttggttccaaattgatgattgggaaggcaggacttgtcaggaaaaagacagggct

SEQ ID NO: 2960 - DNA, 555 bp, Mus musculus
aggtgagtctgctcctgtgcccctcctcagcaggttctgctgttacaaacctggtggccaaatgattcatagtggtgtttacctgctagcccagtggccttcttgtgggcctggggtatggccttcagcaccatattttgggtaatgaaggctcagggttgaccctgacctattgcttttatttctgctaccagtcctttcatggtagagacctgctgctgcctgtaacatagtgtccgacaggttacactacaccaatcattgccaaggtgagcaacagtctccaagtctatcacttctaacatgtctctgttttggcatttgaaggtaatcctgccaacctttgagagaaactgttaacgaatggcataatttccaggttcttagagatgcagcctctgaaaagggttctgtgacggatccaagtcagtcttctgaccctggtgccattggtgggcaggttcccattccttagggccgggaggcacggcttggcccatctctgcttactaacacctgtcttctgtccagtagtagtgttgcttgtgccatgca

SEQ ID NO: 2961 - DNA, 919 bp, Mus musculus
acaatttatatgaatttattgataagttcttggtttgggaacacaatagaagatgtacttgccttagaacatactttggttttcatcaaattccggcacaagcaacaattattatctcaaacacagggccatcagtgtcacagcctcatctcttctcccaaagctccaaaggacttgccacccataatgcatgaacacaatgaagaatgactaacactggagaaggccacggcagtctgagaatccaggggagaaagccgtcagctggcgggagcaggggaaactgtggggctgtcactgaaagcagagtgccagactttctgtaaattaccaacagatggcaagagttgtctagactgaagatactggaaaagcacatcacatatactagaaccttccctgatgggtgtggccagcaattagattgttattattattatttttaaatgtgctgaatgtataatgtatggtgaattatttccctaacaaaaacaatatggatttaacacttgtttccaagtttcaactgatcagataatgaactaatacttctccttcacttccccccacttctcaatgggtcttggatttgtgtgatttcttcactcgcccctttcccccaaagcatttccggcagccataggcacaacatttaaagacaatgaagaccactgtcaacacaatggccaggaggaagccaatcacatccaaggagtggtactgataccaggtgaggtcatgggcggccgggcgcaggtgtggttgcccttgttgctcatcacgtattcaaccagaacacagccaggtccagaggctctataggacggtcttgttaaagctggagaggcgatgatgttctcttgtagctcctgttgttgatgacagtttaagggcattttccaaatcacagcagtcattt

SEQ ID NO: 2962 - DNA, 495 bp, Mus musculus
gattgccttaggctgcacttctgccatggctcctgcagactttccagcctcccttcctctctgtgtgtgcctgctgctggcctctggcttggccaggcaggcaggctgctggtggtgcccatggatggaagctccctgcctacgatgcagacggttgtggagaaactccttcacaaaggccatgaggtcgtagtggttgttccggaggtgagttggcagctgacgaaaccattgaattttgtagtgaaaacatatgcagtttctcatacgcaggaggatttaaaccgggagttcaagatttttattgatgcacaatggaaaagtcagcaggagggaggaatacttcctctgcttgattctccagccaaaggtttcttcgaattactgttttcacactgtaggagtttgtttaacgacaagaagttagtggaatacttgaagcagacttcttttgatgctgtgtttctggatcctttcgatgtgtgcggcttaact

SEQ ID NO: 2963 - DNA, 712 bp, Mus musculus
atggttggagagtggacagcacttgtttattgtccagtttcccaaagggatgagaaattgtcaggctagggtgtggactcacgaggctgcctgccaggcccggtgctgctgggcaaatcgttgcatccgatcctcaagctctggcctgaaatgtcggatcagaccctgtactggccaggcagccccatcacccagagcacaaatggtgtggccttctatctgcttgctgatctcccacagggagtcaatctcagctggccgggcatctcccttcacaaatcgggccatcaccttgttcatccagtcaacgccctcacggcacggggtacactggccacagctctcatgcttgtagaactcaatgagacgagcgatggctttcacaatgtctgtcgagcgatccataacaataactgcagccgtgcccaggcctgtctgagcctgcaccagtgcatcgaagtccattagcacggtctcacacacagatttgggaatcagtggagtagatgagccaccaggaatcacagcaaggaggttgtcccagccacctgtgacaccaccagcatgtttctcaatcagctctttcagtggcacagacatctcttcctccacagtgcaggggtggttgacatggccagagatgttaaacaatttggtacctgaattgcgttctcggccaaagccagcaaaccaggtgcccccacgacggcaa

SEQ ID NO: 2964 - DNA, 584 bp, Mus musculus
gcctatgaagcaggtctgattggcaagaatgcttgtggctccgactatgattttgatgtgtttgtggtgcgtggggctggggcctacatctgtggagaagagacggcacttattgaatccattgaaggcaagcattttaaagccacgcctgaagctgccctttccagcagatgtgggagtgtttggatgccccacaactgtggccaatgtggagacagtggctgtgtcccccaccatttgccgtcgtgggggcacctggtttgctggctttggccgagaacgcaattcaggtaccaaattgtttaacatctctggccatgtcaaccacccctgcactgtggaggaagagatgtctgtgccactgaaagagctgattgagaaacatgctggtggtgtcacaggtggctgggacaacctccttgctgtgattcctggtggctcatctactccactgattcccaaatctgtgtgtgagaccgtgctaatggacttcgatgcactggtgcaggctcagacaggcctgggcacggctgcagttattgttatggatcgctcgacagacattgtgaaagccatcgctcgtc

SEQ ID NO: 2965 - DNA, 451 bp, Mus musculus
ggagaggagttccagtcgtcgtcgccgctgccactgcccgtgtgtgccgcgtcagtcatgccgaagcacgagttctccgtggacatgacctgtgagggctgtgctgaagccgtctccagagtcctcaacaagcttggtggagtggagttcaacattgacctgcccaacaagaaggtctgcatcgactctgagcacagctcagacaccctgctggcaaccctcaacaaaacaggaaaggctgtttcctaccttggccccaagtagccaggacctgggcgagtccttccggatataaactgaagaggcaggctgttgatctggtctccccggcagatctggaacaccaactgctcagtccagtccagcccagccatggagttcctgcccagacaggccttccccgctggctccctgcaagcttccatgtaataaagtcaagctgagtttgttg

SEQ ID NO: 2966 - DNA, 151 bp, Mus musculus
ccttttttaaatttttttttttttttttttttttttttttttttttttaacaaaaaaacacacaaaaaaaaaaaaaaaggaagcaaaacagaggacaaaagaagaaaaaacaaaccgaggcagaaaaaccacaggggcaaaaaaaaaaacc

SEQ ID NO: 2967 - DNA, 461 bp, Mus musculus
acataccgtcaattttttattaaagaaatatgctttgatgtgctagcataactgctctagcttcttgtgtaccatagtaccatgtggcttcagatttagtaccattgtattttaaaataatttacccagctgtctgacagcaaggctgaggtgagaaccgcgaaggctcagcttccgggtttcactgggaggctccccagagcagcctcttgcaaaagccgtggtgttcccagaaaagctgctcgggtctgtaagctggttggatgccggaacctttggttccaagcggtgcaacgagccggcagcaccaaggatcttccggggagggaaggcgcatcgccatggcggcagcgccgttcttgaagcactggcgcaccactttcgagcgggtggagaagttcgtgtccccgatctacttcaccgactgtaaccttcgcggcaggtgtggtccggatagtcga

SEQ ID NO: 2968 - DNA, 481 bp, Mus musculus
gaccacacctgccgcgaaggttacagtcggtgaagtagatcggggacacgaacttctccacccgctcgaaagtggtgcgccagtgcttcaagaacggcgctgccgccatggcgatgcgccttccctccccggttttccttggtgctgccggctcgttgcaccgcttggaaccaaaggttccggcatccaaccagcttacagacccgagcagcttttctgggaacaccacggcttttgcaagaggctggctctggggagcctcccagtgaaacccggaagctgagccttcgcggttctcacctcagccttgctgtcagacagctgggtaaattattttaaaatacaatggtactaaatctgaagccacatggtactatggtacacaagaagctagagcagttatgctagcacatcaaagcatatttctttaataaaaaattgacggtatgtaaaaaaaaaaaaaaaaaaaaagggcggccgc

SEQ ID NO: 2969 - DNA, 651 bp, Mus musculus
tggctttaagctttgctctcttcgggccgccgcgaccatgaagactcccggcgtcttgctgctcattctcggcctcctggcttcgtcctccttcgcgattatcagaatccctctgcgcaagttcacatctatccgtcggactatgacggaggtgggcggctctgtggaagacctgatcctcaaaggccccatcaccaagtactccatgcagtcatcgcctaagaccacggagccagtgtcagagttactcaaaaactacctggatgcccagtactatggcgatatcggcatcggaaccccgccgcagtgtttcacagtcgtctttgatactggctcctctaacctgtgggtcccctccattcattgcaagatacttgacatagcctgctgggtccaccataagtacaacagtgacaagtccagcacctatgtgaagaacggcacgtcctttgacatccactacggcttaggaagcctctctgggtacctgagccaggacactgtatcggttccatgtaagtctgaccagtcaaaggcaagaggtatcaaggtggagaaacagatctttggagaagccaccaagcagcctggaatcgtatttgttgcagccaagtttgatggcatcttgggcatgggctaccctcatatctc

SEQ ID NO: 2970 - DNA, 130 bp, Mus musculus
atatttcattagggatggttgttataaccatgttgttgctgggaattgaagttggaaacatcaggaagaaggatgagaagggaagtcagaaagtgttagatagggggtgttgtgtggagggggagggggg

SEQ ID NO: 2971 - DNA, 735 bp, Mus musculus
aaattcagtgatttattgggtagacatactcatataaccaatgaaaactgtatgatagaaaataatttaggaaatgttgggtgttagcagcaccatttgttattgaaatagcaagaaaaacttcacatattttaagcaaacactagaagagaatatatggcctaatgccactggtctgggacaaatggtgtgtgaggcaaacacacttccttctgtgccagagatttcagtaaatacagcaaatgtactgttctagcagagtgcactgaagttaggagatactgcatagtgtaagtgggacaaggagactaaaatcagctacattagcacagctcagtatttttcctatgaaaggtttacttctgaattatgaaatgtgaaataaaatgtaattttaaaagacactaatggtccctgggaaacattaagtggagcacagatcactatgaaaatacttcacttttccagtttgcttagtaattttctttaaaaagtcatgtgttcttcacaaggggtgtatataagtatgtagtaagcattttaaaaactttaaagacatttttaaaatcttaaagattcttctgacttttcttcaacattagccctgctgtcacaattactatgtgtcagagtaagagactaaacttgtgtaaaggatacaaatttacacacattttacagcaacctattccctacatctacaaaattcacattataatacaggcaagtacaagg

SEQ ID NO: 2972 - DNA, 478 bp, Mus musculus
gatagccctacttacaacagccaggagacctgtgtgatgacttcttctccaagttctacaccaccaatcaagtcaccggaagaagatgcatggccaaggctgagctctaaggaccatatacctgcccttgttcgcagtaatgccttctcagagaagtttttagaggtcccagctgagatagctagagggaatatccagactgtagtgatgacctcaaaagactcagagacacttgaagaaaattgccccaaagccctgactttaaggattcatgattctttgaataatactctgtcagttggcctcattccaaccaattcaacaaatactatcatggaccaaaaaaacttaaagatgtcaactccaggtcaaatgaaagctcaagaagttgaaagaacccctccagccaattttaaaaggacattagaagaatccaactctggcccccttatgaagaagcaccgacgaaatggcttaa

SEQ ID NO: 2973 - DNA, 864 bp, Mus musculus
  misc_feature (1)..(865): n is g, c, a or t
aaagaaaaaataatatttatttgcaatataaacaacgtcccgttgctggctcgggatatatatgtgtgtgtgtgtgtctatatatatatgtatgtatgtagggtcacaaactttccttcataagatcctaaagcaaaactggccaccttctggtataccctcatttacactctgatccatgtttctgggttttcttttaaaaaatgagaagggggggggtaagggagggagggagagagagagagagaaacatgccatgtacagaatggaagttttgttttttgtttttggtttttttttttgccaatttctcaactgtggcaagattttaaactgcttccctaaagaatccctgaaaaccagccctgtgaggtaagatgtggcctcagtcactgccccctgcgggtgtgcgtcccatcaggaccccagcacttcctgttcctcatggtgcctagggagaagcaaggctgagaagcgatgaaaccggaggagtattatggagcccgtggctttgtgctatggatcctgggatgggggcctcttaccccccactagccagtccttgccccacctggacaagggggctgggggtgaacctcgttggagtctacagcaaagctaagggactgggaaggctttacacaggcactgtggcctctattcccagttcagagacagagatgaggacagaagtggtgggcagtttatgaaagggccagggcgcacancttcaggggcggagcaagantggctaatgctactgcttgccactcccctgcagcaccacctccagtaggacctggcagggaggtctgcaggactctcagaaaggttggtaggagggcagacaacacaaagaccacc

SEQ ID NO: 2974 - DNA, 650 bp, Mus musculus
cctgctgcccctctggcctgaagaacccacagatgtcacctgtgtccagagaaccaggctgagcagtggctgagctcccatgccatcctgtgcagggtcctgtggcagcacttgccagatggcctcagctctccagacatgttgctaagcgagcgttggcctcagctttcagacttgcggcttgggggctggtggggccttgcctctgccccaggacatccattcggctgatagcccagccattctggctatttttaaagacatatccacagacctgaggttgctacttttggcaggtaaatccgagctcgctggagcagagttcaagctcttcttggtttgtttttttcttttcttgtcttttcttttcttttcttttcttttcttttcttcctttctctttttttttttaacaaagtgttatttttcaggctaaatgcaacaatggattgtataaaccaatatttcaccccctttcctaagacagagagagagagagagtgttctcagtttcttgtttcaaaaagcaaaccatcgatgtattttgttttcaatggaaaagacaaaccccatgttcttgaccaaatgcattttgcacgtgtgtgaagtctgatttcccagcaggccattctggaagggtgggttgtcac

SEQ ID NO: 2975 - DNA, 737 bp, Mus musculus
agtgtaaacaggtttattctgaggacagcgccccatttttggctgctccaaccatggggtgacgagggacagctggaatgcacgagtagaaaagtcagtcctgggaacaggaacgccatcagtcctcttcatcctcctcagccaggcccaaggcccgggtgcctggggcccgagcagggcttgtccgctggatagaaacgatgccactgagcagggcatagcccaccatggctgccagccctgccagcacagagagaatctgggtccggcgccggtatggctcctcctcggtctcaggggctgctggtgtctggcgtggaagtggcacctcatctccatcccggggaaagtagaggttgaggatgtgggtgcagtaggcgcagaggttgtgcagcccccgaagtgggcctgcagcttcccactgggcagcttggcctgcagcagcagcgccaaatggctaaaaacaaaggcgtccagggaggcaggggcatccccaaagaagaacttctgagagcccagacgctgagagagaagggttaggcactcccgagcctcttggtatagctctttttctagttcctcctcgttctctgatctgtgctcgccacacagcagctgtaaccgctccatgtactggcgctgcattcggccgggcaggaagaagttgaggggaaagggcatagcctctgcataccactttcgggtcacttccacatagttcttggcgtctatccaaa

SEQ ID NO: 2976 - DNA, 627 bp, Mus musculus
ggcggcgcccatggagctgttctgctggtcagggggctggggattgccgtcggtggacctggatagtctggccgtgctgacctataccagatttacaggcgccccactgaagatacacaagaccagcaatccttggcagagcccttcaggtatccctgagggacaggaatgtgccaggggaggagcaggggacaggaatgcaatgcaaatgagtatgactaggcaagctggaccctgtgagtatacttctttctcaatatcaggaactctgcctgctcttcgaaccagtgatgggaaagtcattacagtgccacacaagatcatcacccatcttcgtaaagagaagtataatgccgactacgatctgtcagctcgccaaggagcagataccctagccttcatgtctctgctggaggagaaactactgcctgtgctaatccatactttttggatagacgccaagaactatgtggaagtgacccgaaagtggtatgcagaggctatgccctttcccctcaacttcttcctgcccggccgcatgcagcgccagtacatggagcggctacagctgctgtgtggcgagcacagatcagagaacgaggaggaactagaaaaagagctatacca

SEQ ID NO: 2977 - DNA, 286 bp, Mus musculus
ctatgggtctcttttgtttgatggttgcgttcttgatcttgtttgccatgtaacagaaattactgcctgaaatgttggcattcatagtaattacggatgtaattctgtgtatcttgctgtgactccgaagactgtagtactggtgtcatggaaatatatgttatttccacagtcatttcattaaagatgaaaactttaaaaaaaaaaaaaaaaaaaaaaaaaaaaaaaaaaaaaaaaaaaaaaaaaaaaaaaaaaaaaaaaaaaaaaaaaaaaaaaaaaaaaaaaa

SEQ ID NO: 2978 - DNA, 106 bp, Mus musculus
gcggccgccctttttttttttttttttttttttttttttttttttttttttttttttttttttttttttttttttttttttttttttttttttttttttttttttt

SEQ ID NO: 2979 - DNA, 671 bp, Mus musculus
aaaagccatatttataattaacctccaatatgacaacacacagagaacagacagccacagctcactagaagcctgggggcttattcttaacacccggtggctcccaagatagaatacagaccctggagcaactggagtgactcttaggttacaggatggacgtgagcattacagggcaagactccctgaggtgtcttctcctgggagaagaggcactgagtcactgttggcaggaacagggacaggccatatccacatggctcccagagagtgctgaggcttcttcttgccgctaggtcctccaaaatgtcttgcacctagttcctctgctgcttcccacttctaggtccagcagggcccagagggaggagcagtgctttgccagtgaagatgagcatgatcgtgatctgaagaccaccctagaggttggtggctatggctcctcctccacctgtccactctcaggaaagggcaggtggggacatgcagctgcactcacctgcagaagctaaccttaggccctaggacttcctggtcagatccactctccagagtagagatggacattacactactgtcacagtgcttcagctgaaagcagggatctcagagtctctgctcatccccgtggggacaaaccatgagatgccaagaatttggaacccagtgct

SEQ ID NO: 2980 - DNA, 597 bp, Mus musculus
tctacgaaatccacccccactggcctctacgggtactgggggaacaaagggggagtcaacgtctgcctgaagctttatggctactacgtcagcatcatcaattgccacctgcctcctcatatgtataacaatgaccagcgcctggaacactttgaccgaatcttggagagtctgacttttgagggatatgatgtccccaacatcctggaccatgacctcattctgtggtttggagacatgaactttcgaattgaggactttgggttgctctttgtgcaggagagtataacgaggaagtactacaaagagctgtgggagaaagatcagctcttcattgccaagaaaaatgaccagctgctccgcgagttccaggaaggcccgctgctcttcccacccacctacaagtttgaccgtcactccaacaactatgacaccagtgagaaaaaacgcaagcctgcgtggactgaccgcatcctgtggaggttgaagcggcagccgtcccaggccagccccttggcctccagtgtaccaacctcctacttcttgctgacactgaagaactatgtcagccacatggcatacagcatcagtgaccat

SEQ ID NO: 2981 - DNA, 273 bp, Mus musculus
aaccagtaaaatacaaaatttaaaccccaaagcttaacaatgaagggccaaacaacacatacctagcatgtcagccaaatgtacacagctattaccagttacacaagatatgacctaacaaatgcaagggaacttttaaaactagtttttacaagtatccatttccaccttgaacactgaagccatcatacatacagggcaaagccagagctttaaaattggggttaatcccccatttaacttttttaaaaaccctaccaaagttgaatatta

SEQ ID NO: 2982 - DNA, 591 bp, Mus musculus
gaccatgctgtttttacaaggcgaggagaagaccttttcatgtgtatggacatacagctggttgaagcattgtgcggcttccaaaagccaatatctactcttgacaaccgaaccatagtcatcacctctcatccaggtcagattgtcaagcatggggatataaaatgtgtgctaaatgaaggtatgccaatataccgtcggccatatgaaaagggacgtctaatcattgagtttaaggtaaactttcctgaaaatggctttctctctcctgataaactctctttgctggaaaaactccttcctgaaaggaaggaagtagaagagactgatgaaatggatcaggtagaactggtggactttgatccaaatcaggaaagacggcgtcattataatggagaagcgtatgaggatgatgaacatcaccccagaggtggcgttcagtgtcagacctcttaatgggccagtcactctttgacattctgtatgcagtagtgaatgtgggaaggactgtaatcataataagctcactacttggctattgtttttgttttaatattcaactatagtagtgttttaaaaaaagttaaatga

SEQ ID NO: 2983 - DNA, 756 bp, Mus musculus
ccatgtagatcattttattgtaaaaatgtaagcaagtacaaatcatcctatgtgaaatcactgcgtattaacatcaacataatccaagtgggaaaaaacaagaatctgattagctgcacagcacagcacagcacagcaccgcacagcacaggaataaacattaagtttcaacagtgctaaagttacttttggaagacatgatgcgagtatggttttgcttataaggaccttagaaaaataaaaaaaaaaattctgagtgggccatctttatcatctcttcatgtgtgtgtatgagtgtgtgtgagtgtgtgtatgtgtgtgtagtgtgtgtattgcatgtgtgtgtgtgtgtggtatgtgtgttgtattgtatatataccagaccatgaggtaataggagaatacactattctcgccaagatttttatcttgtctaatcaagtcatgtttctggctagaacacctttcttgtaatcattttaaatgtagtcatttaaatgaataatccaaacagaagtcctattagatccatgtttctgttaaatgattgctaagccctaacctttcatttcccttcaggaaacggcatcaaaagcatggttatcattcactctagaagcccggattatcgttttaaagtcatcagcgtgagtctgcgctccggagtgggagaatccatccagcggtgattacaggtgatcctcaggctcggcttcacgagaggtctcctcagcggaggctgagcaccggagttac

SEQ ID NO: 2984 - DNA, 594 bp, Mus musculus
gagaccgctgcgtccgtccctgctgtctcacgttccgcagctctgcagctccgcaatcctacaccatgtcggacagtcgggacccagccagcgaccagatgaagcagtggaaggagcagcgggcctcgcagagacctgatgtcctgaccaccggaggcgggaacccaataggagataaacttaatatcatgaccgcggggtcccgagggcccctcctcgttcaggatgtggttttcactgacgagatggcacactttgacagagagcggattcctgagagagtggtacacgcaaaaggagcaggtgcttttggatactttgaggtcacccacgatatcaccagatactccaaggcaaaggtgtttgagcatattggaaagaggacccctattgccgttcgattctccacagtcactggagagtcaggctcagctgacacagttcgtgaccctcgggggtttgcagtgaaattttacactgaagatggtaactgggatcttgtgggaaacaacacccctattttcttcatcagggatgccatattgtttccatcctttatccatagccagaagagaaacccacagactcacctga

SEQ ID NO: 2985 - DNA, 687 bp, Mus musculus
  misc_feature (1)..(687): n is g, c, a or t
gagttcttagacattttattacgcgaaaacaatctcagtctagagtttcaaaagtctttacaaacattatacagtaaactcatataaacagtgtcacaaaaggggaggcaaagtagttggtatttagagtaatcttacagtttactaaaaatgtaataaatgtagtagacattgatgcatagtaatttcctgaggattatttttagcccttccaccacgtccaacatgattgaaaagtaacaaatataaaacattacttttctatggcatctacaaaattgaagcagtttacattgatgggtgaaagtcttccaccagctggcctttgtataaaaagggaaatgtgtgtgaaatatatgtagcaagacagatggccctacttgctaggtttgggacagaaatgcagctttttggtcagcattgaggcgaacagggcacctgttncttgccgattgcatccgggtctttgcagaagtccacgcggcgctgagagacctttctgttcaccagcgtgacagctccgtgaactccagggaactgccgcacctcgccagcatctcacacaaatcctgaatgtaccaggagccattcacagtttctcggtgagagtaatacccttctgcgacagagtagcacatgaggaagtctgcccctgccggcagcgtgtacacggacgcagcatccacc

SEQ ID NO: 2986 - DNA, 587 bp, Mus musculus
ccacatagatgccgattgcttcatctgtgtcctcctgagccatggggaaggcaaccacgtttacgcgtacgacgccaaaattgaaattcagacgttgactggcttgttcaaaggagacaagtgtcagagcctggttggaaaacccaagatatttatcatccaggcctgtcggggcagccagcatgacgtacccgtggttcccctggacatggtggatcaccagacagacaagctggacaacgtgacccaggtggatgctgcgtccgtgtacacgctgccggcaggggcagacttcctcatgtgctactctgtcgcagaagggtattactctcaccgagaaactgtgaatggctcctggtacattcaggatttgtgtgagatgctggcgaggtgcggcagttccctggagttcacggagctgctcacgctggtgaacagaaaggtctctcagcgccgcgtggacttctgcaaagacccggatgcaatcggcaagaagcaggtgccctgcttcgcctcaatgctgaccaaaaagctgcatttctgtcccaaacctagcaagtagggccatctgtcttgctacatatatt

SEQ ID NO: 2987 - DNA, 694 bp, Mus musculus
gggtctatagtaattttattgtaacagagaaaccaggcggcagtacgtctacataattagagcagatggtggttatctttcccaagggcggagtctgagccgggctggcagcacacaaaccccagagtatctccttctgatcctaccctgcacgtctgactcatgtgaagagacaggctgtgcagccaggatggatgaagaggtccagctgggcagaggccccatcccagtaggagccaatcaatcaatgactgaagaggactctgaaatcaagggcagggtctctctctctccacggctctttgatgagagaggaggctatgcaggagcagaaaacctatgctctccattcttatgtaactccccccataggctgaggcggatgtttgcagtagaacgggatgagactctaggctctagaacagcaatgacaaggggcaggcggacacgacactacatcttctactgtccctgttgaagtggcaacagacctgttggtttttgtaaagcataatttctgtaatgtgatctgctgacacagtttgctccacaccaagaggacgaacttgaggacaactgttaatgacagaactagttatttttctcttatagcctctattaggggaggctctactggggtccacgggggagcccctgataccacctgaggctttaggtaaagcgtctgacctat

SEQ ID NO: 2988 - DNA, 552 bp, Mus musculus
cagatctcggctctaccaccatccactgccgtcttaccgcccaccatggccctcctacactccagccgcatcctctccgggatggctgctgcctttcacccaggcctagctgctgcagcctctgccagagccagctcctggtggacccatgttgaaatgggacctccagatcccatcctgggcgttaccgaagccttcaagagagataccaacagcaagaagatgaacctgggagttggtgcctaccgggatgataacggaaaaccttacgtgctccccagtgtccggaaggcagaggcccagattgctgcaaaaaatttggacaaagaatacctgcccattgggggactggctgaattctgtaaggcttctgcagaactggccctgggcgagaacaatgaagtgttgaaaagcggccggttcgtcactgtgcagaccatttccgggactggagccttaagggtcggggccagttttctgcaaaggttttttaagttcagccgagatgtctttctgcccaaaccatcctggggaaatcacacgcccatcttc

SEQ ID NO: 2989 - DNA, 548 bp, Mus musculus
aggtatgaggctgatgccagataagtttttattatattaaaaaaaaaaaaaaaaccagtgcaactgaaatcagggtgagtcgctggaggtgagtgagagtcggaaggccctccacacctcagtggtggcaggatctggacccgtagcctaagcctggtctgatccagccgagatgctggaaagcagagcacacggtggtgcccatcagggaaagagggcaagagagcccacggctcctcgataccgcttgctagggtctcctgtgtagtagccatatgcgtaaaggactcgcccaataatccaggccaggcccaggccagaagctatgcgcgggtggtaaacacctcccaccgttagaaaaacaggaagggagggtacacctccaacgtgttctggtgggcgcgctgaatgcagttgaacatatgcccgttctcaggatctgtgctgtacatgacagggtactctaccttgtacttcttgcgggctttgccacggttgatggctaggtggagcaccatcacaaagctggcagcaccagtgagaagcac

SEQ ID NO: 2990 - DNA, 591 bp, Mus musculus
gaaggtgagccagagccaagatggctgtcctctctaaggagtatggatttgtgcttctcactggtgctgccagctttgtgatggtgctccacctagccatcaacgtgggcaaagcccgcaagaagtacaaggtagagtaccctgtcatgtacagcacagatcctgagaacgggcatatgttcaactgcattcagcgcgcccaccagaacacgttggaggtgtaccctcccttcctgtttttcctaacggtgggaggtgtttaccacccgcgcatagcttctggcctgggcctggcctggattattgggcgagtcctttacgcatatggctactacacaggagaccctagcaagcggtatcgaggagccgtgggctctcttgccctctttgccctgatgggcaccaccgtgtgctctgctttccagcatctcggctggatcagaccaggcttaggctacgggtccagatcctgccaccactgaggtgtggagggccttccgactctcactcacctccagcgactcaccctgatttccagttgcactggttttttttttttttttaatataataaaaacttatctggcatcag

SEQ ID NO: 2991 - DNA, 746 bp, Mus musculus
gtctccatcatttgtatgtattttggggatttttgttttgttttgttttttaaaaaaagatacaaacaatcttcaaagtttaccttttttggacttaaggcataacatgaaattgctcgttattctaaagctggattttgaaataaactagtttagtgctatcaaaccctgcttgcgtgtacagtgtttcaattatagagcacgttgtttatgttcttgctcaagtcctaatgttgttcctgactgtgccatcccatgccactgcctgcctgctgccactcactgccatgcagggagaagccgggagccagctcgcagtcccagctcccatctcagttcaaagcatgctgcttgatggtgtggaagatccaatccatttttgtcgtccatccaccatgatgtgcatcattcatttgctttgtgaaatattccaaagcttcttgctcagttttgtccaaggctagagtctttcggatatatgcaatgtcatcaaaagattgtagttctggcattccagagccaagcatcattgaaaaaaggttgatgaagagattggcatgctgccgaattgctaggtaagccttgtaacacatctcctgaaacctctcaaactctctggtcttggtgtactcttgtgctcccttactaatcacaatcaagaaatcctgtgtcaacacaaatggcacacgttcccgcttatagccaaatgttttcttcttgtgatccaaaaagtgccggatagtcga

SEQ ID NO: 2992 - DNA, 581 bp, Mus musculus
gcactttttggatcacaagaagaaaaaatttggctataagcgggaacgtgtgccatttgtgttgacacaggatttcttgattgtgattagtaagggagcacaagagtacaccaagaccagagagtttgagaggtttcaggagatgtgttacaaggcttacctagcaattcggcagcatgccaatctcttcatcaaccttttttcaatgatgcttggctctggaatgccagaactacaatcttttgatgacattgcatatatccgaaagactctagccttggacaaaactgagcaagaagctttggaatatttcacaaagcaaatgaatgatgcacatcatggtggatggacgacaaaaatggattggatcttccacaccatcaagcagcatgctttgaactgagatgggagctgggactgcgagctggctcccggcttctccactgcatggcagtgagtggcagcaggcaggcagtggcatgggatggcacagtcaggaacaacattaggacttgagcaagaacataaacaacgtgctctataattgaaacactgtacacgcaagcagggtttgatagcac

SEQ ID NO: 2993 - DNA, 709 bp, Mus musculus
gactgtacattttaagtttttaataaaccacaaggcaaaacaacactttatttaataatcgtataggaaatttcattcgaaaattacaaatgcagtacatatacaaagaatctggtcttcattacacagataaaccccagcttcaaaatctttctaaaatcaatcatatgcaaaatacttggtttttggaggggcatatatacaatttcttaaactgtgatatggcttattaatcacatatttatttggagaggcagacattttccaaatataagatatctcctgggtagaaaaggggcatcctggcacatttcaactttgggttgcatttatttcagggtattcttgattgcactatttaaatagacactgtcatggatttagctggcaaggtctccataaacaccaatcttcacaaaaatcagaagaatcgactgttggtctccaacaaatcttttgtaaccataacttactgacgggttgcctaaatggaaacacatgatactgaggaattcctacaattttttttctctagtttgcaatgctcccactaacatcacaagcaatatgcctatctgcaaaatcaaatcttaagcccatagggtccattagacagacctggaggggggattatgagttggcaaatggtgttctagctacagagatattaaaccatttccgagacaccagattttctccctgcttactt

SEQ ID NO: 2994 - DNA, 600 bp, Mus musculus
aagaactgaaataaggatggacactaaacctgtgtctgaggaagcaacataaatatttccaagctcaagggaaggcaattggcagcagttgtgctaaagagaaagtcatgaatattcacgattcattcccagcagttgctttgagatgagctcatttcaacctagcactttgtatggctcttgtctcctcaaagagtcagagtggagtaactctgtaccaaacagattgtgaatagaaatccaaatggtgtgtaaatgaagagtgggaagttgagactttccctgtgttaaaaagtaataagaaaacctgggtttacccaaaaggttgttgggaattgataggttcaaaacacagctgatgtttctccataaaactcaatgggtatttgttgaattcaaagtttactttgaaaaaaaacaaaaagttactttgttgaatttttattgtgagtccatttaaaattataaatacttgaacttcaaattttcttagaatataaactaaataaaatagtgattcgcatatgagtagattataggcatttaagtggctgcctgggcatttgtggcctttagatatgtctaggggaaaaaaggaaa

SEQ ID NO: 2995 - DNA, 696 bp, Mus musculus
agtataaccattttattaacaaaaaggaacccatggggttcaaagaagaatacaaaatacaatctttattttccccttggttaaattattacatttttaataaaaattttaaaaagcaagtgaacttaccaaaaaaaaaaacacaacctttgcctactgagtttcttattgtgcaaaacagagacacagaaagtaaagttgtgctccaggggaagggaagggtctgtgtgcaccaaaagatgctcactttgaatcgcaagctttgtgcatccaaaagaaaatcctaagggcacttttcgtttttcccaaactaaatgagagcaagaggggactagacaggcaagtgttagcagctaaaagtctgatcttcagtcacagggtttcagatgtagttttctacattcctgttatcctgggtataagcttcaggccagacagacaggtataaagttatatctttgcactcttcaatgccactgttagctgtgcttccgttctgtgggggacttcatgatttctctaaccaacccgactgccagggcttatctacagtgagccacggcgctccattttctctctgtccactccgtactgttgctttctttccctccattttggttttatggatggaccatgacttgacatagcacgtaaactacaggctggaagctaaaaaaaggacagctcaccatcttt

SEQ ID NO: 2996 - DNA, 577 bp, Mus musculus
gtaattacattgatactgtgatttttttttaattgttttggtgcaatattttgttgtctttgagcctcaggatattaagacctaaggactgtgttgttgctggcagagtcagccatgtctctaccagcctcctccctctgttcacagtcacatgctcagcctccagtctgttgctcccatgaactgagaaaattttctgacaccaggtgggagggagcctctcacagttaagagctggacaagccaaattctaagggtttgatttagaaaccctggtgcttcccaggcagagtgttgtgccacacccatcgtggagatggacttacctttcagtcaccatgtttccttagagacattctcctagtatgaaattttatatcaaaagtcagtggagcattcgttcagggatttttgtaccaatgtccagtaaatgtgtacttctccccgctgagcatacctctcctgtggtcatcctagcgtcagtcacatgtatgtcactgtatgccattttcaaaaatgccaaatggtattgccagtaactgtggtgtgtgagaatcaccacggaaccctatttctt

SEQ ID NO: 2997 - DNA, 757 bp, Mus musculus
caattcataaaatttcacgtctatttcatgatagaagccatcaaagtaaagcatgaggaataaaaacattttatctgtgtattcagagtcacacacaagttacctttacagttcaattcactatatatagaaatcatttgggttttatatttgcaattaaatttgaactgagattacaatatcatataaaaagattttacattaattattcttaagcataccaaattgaaatacataggtttgactttagatttatggcaaacagtcttcaaatacaatacagacattcttaagtttacctatcattcacatgtgagattagcaattttgggctgtgttacatacaaccactctcctatgcagatggcaactgatatgccacaaagaccaagccagtacagtcaagccaaggactcaagttgtgccaccctttaagttttggcatttctggaccacaacaatgcatatggtagcttggaattttgcataaaaccccatattataccttggaaaaaagtccaaggacaactagatgacaatggactggggtccttagttattatcaatagaacccatgatattcaagtgggcaatattcagatcaaaaatattaagcacctactggtttgatttgagattagagattcatgatcaatttctttccaccttgaaatcaaggtgtaagatccagctattcaagtgcatcccacacttctatgtagcacaagcagcatcttctgtccattggcaccaaagt

SEQ ID NO: 2998 - DNA, 506 bp, Mus musculus
gaccagacaaaatcagctttcatctataattcattgggggtaataggggatttagataatgtatccagagttaaacataccagtttgacccaccccttaagcgtttaaaataaaatacgcaacaaaatggatgacttagtggagatggaagcccattaactgggttccccatcaaatcgtttacatacaagtacacagtttttataaggattcctgttaaaagtcttgtaaagttgatgtctttcacccagatatatcacatgtgagtggaagaccagtgtgacttcattagatacgtttagtgtatttaggatgtgtaaatttgtgcttttgaactgtagtttaataaatgtaaaattgcatcatagtatttgttgtatttgacctaatgtaacccttgtatgattgcaataaaactttgtgtagatcttactgttttttcaggctaaaactttgggaatggggctagctagcaaaggtagttatgaactagttgtgtgtggtct

SEQ ID NO: 2999 - DNA, 815 bp, Mus musculus
gttaacagcaactttattattccactgatgaaaaagttgtagttgtgatgcatttcacataaatttacaatagtggaggttatacataaattacattaagtcacaaaatttctattttatagaatcaaattactttgatgtatccagataatggcatagttcttaatggatagctgagtccaaatatgcaaaatatagcttctgcttctgaccatggtgctttaaaattcttcaacatgcattaatatattctagttgtagggaatatattacacataggctttatcttgcattcagggaaagcccacgctgaatttcacgcacagtactcctgtcctctaaagtaatctcacataggaccagagaacgaagaaacaagtatgtttgggttagtattcctcattaatgaagaaaatacacaatcaacaattcatcaaaataaaaataagaaaggagagctccattagtagccagaataagtgggttttgctttcaattttcacagatcacagaagtttaaagagcagatcagtcatgctacttgggtgatcagacagacttaaacaattatgaagtgagttaaggtcctgaaggtgtctggaggtgctgggtaaacacatcacaggtaaggaatgggaaacctacctcagcatttctgaaaggcacaatctatggaagggagacctagttaagccctttctgatgtgtagaaaggagtatgctgagctgtcttcttttaaaggatgagaccttcatagattggcccctcagactctggtgattccgtcttgagcgcaatgctcaatgtgttgtga

SEQ ID NO: 3000 - DNA, 577 bp, Mus musculus
gggctcgcaaggctcggtcacctgacggcgggcggctccggcggggtaggcgctgctgcttgtggtccccggagtcgccatgcctacaacacagcagtcaccccaggatgagcaggaaaaacttttggatgaagccatccaggctgtgaaggttcagtcattccagatgaaaagatgcctggacaaaaacaagctgatggatgctctgaagcatgcctccaatatgcttggagagctccggacctctatgctgtcaccaaagagttactatgaactttatatggctatttctgatgaactgcactacttggaggtctacctgactgatgaatttgctaaaggaagaaaggtggcagatctctatgaacttgtacagtacgcgggaaacattattccaaggctttatctcttgatcacagttggagttgtatatgtcaagtcatttcctcaatccaggaaagatattttgaaagatttggtagaaatgtgccgtggtgtgcagcatccgcttaaggggtttgtttcttcgaaattaccttcttcagtgtactaggaacattttacctgatgaaggaga

SEQ ID NO: 3001 - DNA, 589 bp, Mus musculus
ttccacgtttagagtcccaacatctccagtatgtgtgctgctcggctctccgcggcggcacagtccaccgtgtatgccttctccgcgcgcccgctgacgggcggggagcctgtgagcctgggctccctgcggggcaaggtgctgctcattgagaatgtcgcgtctctctgaggcaccacgatccgggactacaccgagatgaacgatctgcagaagcgtctgggacctcgtggactggtggtgctcggtttcccgtgcaatcagttcggacaccaggagaatggcaagaatgaagagattctgaattccctcaagtacgtccgacctggtggcgggttcgagcccaattttacattgtttgagaagtgcgaagtgaatggtgagaaggctcacccgctctttaccttcctgcggaatgccttgccaacacccagtgacgaccccactgcgctcatgaccgaccccaagtacatcatttggtctccggtgtgccgcaacgacattgcctggaactttgagaagttcctggtgggccccgacggtgttcccgtgcgcaggtacagccgccgctttcgtaccatcgacatcg

SEQ ID NO: 3002 - DNA, 79 bp, Mus musculus
gtgtgtgtgtgtgtgtgtgtgtgtgtgtgtgtgtgtgtgtgtgtgtgtgtgtgtgtgtgtgtgtgtgtgtgtgtgtgtg

SEQ ID NO: 3003 - DNA, 905 bp, Mus musculus
gatgaagttcagcatccactctcggtgtgaggacgtctcctgtgcatcaccaggtcaaaggcaggacaactgatgggcatcctggtgaggttctgtagagccatgcgcgcacacagccacccgtttaagctttcaataaatacaaacattttaaaccatgttcgacagaataaattaaaaacactgcattcctcttggcctgcttagcctctcgggctggctcagagtgctgctagttggtggcgactccgcgctgtttggacttgaacacttccagctcctctggtcttagcactttctttgcggcaataatggtgttcttcatgagcatggccacggtcatgggacccacaccaccagggacgggagtgatataaccagctttcttcttgactccttcaaaatccacatctccaaccaatttgggctttgcagtgacaggatcttgaactctgtttattcccacatcgatgaccgctgctccttccttgatcatgtcagctgtgatcagatttggaatgccagcggagagtattacaatgtctgcaaggatcgtgtgcttcttcagctgctctttgggagtgtatcgatgagatattgtgactgtggcatcacccccgggccgttcgtgagctccatctgtgtgcagcaacattgcaatcggcattccaacgttttttgacctgccagccactaccacattcttccctaaggttggaatgcctgttcgcttaattatctcccacacgcaccatggggttgctggcagcatagagtactggtccaagcacattcgccccacgttaatgacatgaaagccatcaacatccttgtcaggagaaacggcattgcgagacttcctctcatcaatgtgctctgggagtggcagctgaacaaggaggcat

SEQ ID NO: 3004 - DNA, 580 bp, Mus musculus
cccttccacctggcggcagtgcgaaatgaagccgttgtcatttctggaaggaaactggcccagcagatcaagcaagaagtacagcaggaggtggaagagtgggtggcctcaggcaacaagcggccacacctcagtgtcattctggttggtgacaatcccgccagtcactcctatgttctcaacaaaaccagggcagcagctgaagtgggaatcaacagtgagacaattgtgaaaccagcctcagtttcagaggaagagctgctgaattcaatcaggaagctgaacaacgatgagaacgtagatggcctccttgttcagctgccactcccagagcacattgatgagaggaaggtctgcaatgccgtttctcctgacaaggatgttgatggctttcatgtcattaacgtggggcgaatgtgcttggaccagtactctatgctgccagcaaccccatggggcgtgtgggagataattaagcgaacaggcattccaaccttagggaagaatgtggtagtggctggcaggtcaaaaaacgttggaatgccgattgcaatgttgctgcacacagatggagctcacg

SEQ ID NO: 3005 - DNA, 397 bp, Mus musculus
gaaagtgaaccatgttaatttattggcatagtcaatttatcaacgagatgggcagcctgtcccccaggaggtgaggttgatttccatctgccagaacaggggcccacatgcttcaccttcaagactcagcacttcaggcttcagattcagctactccttcttcgagactttcacaatttttatgctgctgcccgaagtcttctcagcgttcgctttgaactcggtcttcagggcatccctcactgcttttgcacagatctgggaaaaccggatgtagctgagtccagcctgtcgccagtacgccaccatggtgtctcgagcgggcgcgtcgggcagaaccgctgggtcgcttcagagtagcctcaaaccggcccggcagcagggaggggatagtcga

SEQ ID NO: 3006 - DNA, 430 bp, Mus musculus
ctccctgctgccgggccggtttgaggctactctgaagcgacccagcggttctgcccgacgcgcccgctcgagacaccatggtggcgtactggcgacaggctggactcagctacatccggttttcccagatctgtgcaaaagcagtgagggatgccctgaagaccgagttcaaagcgaacgctgagaagacttcgggcagcagcataaaaattgtgaaagtctcgaagaaggagtagctgaatctgaagcctgaagtgctgagtcttgaaggtgaagcatgtgggcccctgttctggcagatggaaatcaacctcacctcctgggggacaggctgcccatctcgttgataaattgactatgccaataaattaacatggttcactttcaaaaaaaaaaaaaaaaaaaaaaaaaaaaaaaaagggcggccgca

SEQ ID NO: 3007 - DNA, 723 bp, Mus musculus
gagctttgtttggctttattgctgaaagtatgggcttattagtccccaaatatcacttctttaaaccacttgagcagcagctacaaggctcactgtgaggagggcttggctgctgggagctgaaacaggtggtgtgtatcagggccatctgccttcagcaccttttgtttcaaattctagtcagaagcctcttcctgaatcatgagatgtccttgaggccctggggaagggaaagccaggaggaggggttccctgtcctctctggttccacttgtcctcagaatctatctccaaactccaaatagcagaatcttgggtttcctcttcccatgagtcacttgtcactggaacctggagtcagcttttctaccagaaagtccacggaggttgcagtagctcaaaggtggggatactggtgacattgactgggatagagatgatggcccatggtagcccgtgctgttccagagaacggcggatcatgtagctgggagggcatgaagagcagtatagcgtcggtcactttctcagcacccaacactgccctctgccccagttatgctgggagttccagaaactcagaacttttttgccctctgactgggatattcaagatagggcttgtgagagggtactggtgattgtttttgaccccaccaagtcacaacacccagtgcagcatggccagccagaagcaaagagccctcacccatctcggccgag

SEQ ID NO: 3008 - DNA, 514 bp, Mus musculus
gctagaggagtcggaggtccagggacgctctaggaactcgcgttagctttggcgggggtcatcgagtctcgcagtgcttttggtttgtaaggtgcggtaaggtcccgcctcagcccgcgctcccagacgccatggtagacgtgcaatgagctatcagtactgaacaccggctaggagaagcaccttaggcttacgcatccatgactacttatacttccaagtgctgagtcctggggatattcgatacatcttcacagccacacctgccaaggactttggtgggatatttcacacacggtatgagcagattcacctcgtccctgctgaacctccagaggcctgcggggaactcagcaacggcttctttatccaggaccagatcgctctggtggaaaggggctatgtaccgatgaacctcaatacaagttctctatggtcctttcagcctcccagagagggtgtaagggaggggcagctagcacctgcctgacttttgatctcatcaccacctctt

SEQ ID NO: 3009 - DNA, 708 bp, Mus musculus
gggagtctggaaaggtttattctcacaacaaaacacaaagtgtgggcataataagccacctcaccttctggtgtctgaggtcactgtgactggtcagcaggcgaccgtgcagcagtaattatggagaagagggttggacaggagacaagttttctcacttcaagcagaaatacaggaagaaaaaaacgcaaaaaatccaaacaaacccagctctaacccgacccccctcccatatctcctgtcacaggcctggcctggaagacccctgatggccacctgacttgtatgtgatttgggcagagtccacctgaagaagagcctagctctctaacttgaggctggctcataataactcgaatggaggtactactaagcaatttgaaagcaaacacataacaacaagtagaaaatcaccctctttttatgcagggcagggagtccccagagggcctccccagggacaggagggccagtgtccatccccagggtggctctgcctgcttgcactttaggataccttgagtaggctggccagtaccatgcagatcactcagacctcacagctgacctggccatgatgcgcggcctctgctcctccctgggcacagcttcctcggtgcagattcccagggctgaggcttgccacaggattcccctttaccagcttgcacgctactcaattttcagcccttggacttgaactcgatg

SEQ ID NO: 3010 - DNA, 505 bp, Mus musculus
gaatcctgttgcaagttcccatcatcccaggaggcagaggaggcctccagctgccctcggaagaaagactccagccccatggtgatttgtcagctgaaaggaggcgcccagatgctctgcatagacaactgtggcgcgagggagctcaaagcgctccatctgcttcctcagtacgatgaccagagcagtttccctcagtcagagctccctaagccaatgacaactttagtgggaagacttctgccagtaccagcgaagttaaatctcatcacacaggttgataatggagctctcccatcagctgtcaatggggctgcctttccctctggacctgctctgcaagggccacccaaaataactctgtctgggtactgtgactgcttctccagcggggacttctgcaacagctgcagctgcaacaacctgcgccatgagctcgagcgcttcaaagccataaagggcgtgtcttgatagaaatcctgaagctttccaaccaaaaatgggg

SEQ ID NO: 3011 - DNA, 705 bp, Mus musculus
cctgtttttgtttttttgtttttttttgttgaggtttgacttacaataatgactttattttattttaacatagttaattacagaacataaaatagctggggggtgggccccagccttgccccaccctgaggctaccaggaggaggcctccctgatgaccctcttttggggtcttcctatggcagggtcctattgctttaccaggggaggagccatgcaggtgaaggggcaagacctcctcttggccccacccctacccaggctggccttcctccaaatgcccaggctgtgccctacctccagtctcctttctctgaccaggagcctgtcgtctgctgccccacgctgcccccaccccctctgcaacctaaaggggaataaatacaaactttacaaagtaaaagggggtccaacgttgccctggggcggggcagcaggccgagggcgggaccattcagctgggcaagtcccggctcactgctgctgacagcctcacatcattcctagctgcagaagcgtgttggcgtatgcatcgggcttgacattggggtgaggcactgctgtgaattggtggaactggggccgcagtcggagccctggaggtggatgtaggaggctttgtttcccatctggtcacaatagttgggggcagaaaagacagtgacacagcggccaccatgggccacctcgtagccctcggctttga

SEQ ID NO: 3012 - DNA, 561 bp, Mus musculus
ggcgagcggactgagtgtgctgagaccccccgggacgaacccccggccgatggcactctgaagcgggcagaggagctcaagacacaggccaacgactacttcaaagccaaggactacgagaacgcgatcaagttctacagtcaggccatcgagttgaaccccggcaatgccatctactatggcaaccgcagcctggcctacctgcgcactgagtgctatggctatgcactgggcgacgccacacgggccatcgagcttggcaagaagtacatcaaaggctactaccgccgggcggccagcaacatggcactgggtggtgaaagtgaagtctaatgacaaggatgccaagatgaagtaccaggagtgcagcaagattgtgaagcagaaggcctttgagagggccattgcgggtgacgagcacagacgctctgtcgtggactctctggacattgaaagcatgaccattgaagatgagtacagcgggcccaagcttgaggatggcaaagtgacaatcaccttcatgaaagacctcatgcagtggtacaaggatcagaagaaact

SEQ ID NO: 3013 - DNA, 733 bp, Mus musculus
  misc_feature (1)..(733): n is g, c, a or t
gcagccgcaggccagaggtggcaccgagtccgcttgctacttgactgagactcggagaggcgtccccgcggacggtgagagccagaggcactgagagtatgaggccctggcctctgagggccactcactcgtgatcacttccaccacggcagaaccttctaagcctacctcctgccgtgtggtgatctacctgcagcgggagatgtcaggggacacctgtctgtgtccagcctcgggggccaagcccaagatcagtggcttcaagggaggcgggctgggcaacaagtacgtgcagctcaatgtgggaggctccctgtactacaccacagtgcgggccctcacccggcacgacaccatgctcaaggccatgttcagtgggcgaatggaggtgctgactgaccaagaaggctggattctcatagaccgatgtggaaagcactttggcaccatcttgaattacctccgagatgacaccatcaccctccctcaaagccggcaagaaatccaggagttgatggctgaagcaaaatattacctcattcaagggctggtgagcacgtgccagactgccctgcaggacaagaaagactcctaccagcctgtgtgcaacatccccatcatcacgtccctgagggaggaggacaggctcattgaatcctccacanagcctgtggtgaagctgctgtacacaggagnncacacagtactcatacaccagncactctgatgatca

SEQ ID NO: 3014 - DNA, 28 bp, Mus musculus
gcggccgccctttttttttttttttttt

SEQ ID NO: 3015 - DNA, 446 bp, Mus musculus
ccgttttgactatttaatgataaagcaacattttaaaaaattgagtctttcctctaagtgtttagacaccttcactctgcttgtccaatctgtacaaagacagccactggcagggctagaaatacatctgaaccaggcactgtaggtcatacacagtcagggagggtgctgagctcaggaaggctgcagaagtgattctggctgtgggggctgaaggagtacactccaccccccatacagagtcaggggtgtgtgacacagagcatctgtcacctggaccatgaaatgtcagatagtgtttaggggagtctggtcagtgaatagaaatagaacccagggtcctaggggctacgtctcaagctttgtagagaaagcagtcacaacccacagcccatccctaattcacaggaaggactcctgctcccatgacggactgggatagtcga

SEQ ID NO: 3016 - DNA, 460 bp, Mus musculus
agtccgtcatgggagcaggagtccttcctgtgaattagggatgggctgtgggttgtgactgctttctctacaaagcttgagacgtagcccctaggaccctgggttctatttctattcactgaccagactcccctaaacactatctgacatttcatggtccaggtgacagatgctctgtgtcacacacccctgactctgtatggggggtggagtgtactccttcagcccccacagccagaatcacttctgcagccttcctgagctcagcaccctccctgactgtgtatgacctacagtgcctggttcagatgtatttctagccctgccagtggctgtctttgtacagattggacaagcagagtgaaggtgtctaaacacttagaggaaagactcaattttttaaaatgttgctttatcattaaatagtcaaaacggaaaaaaaaaaaaaaagggcggccgc

SEQ ID NO: 3017 - DNA, 407 bp, Mus musculus
ggagggaaaattggatcacaaaacatgcagttgggaattttcgattcataaactatttctatggttcagggaagattagagttgctggtacaaatcatggaaacgggttccgcttgatttcaatcattgcttaccattcgaaggccacctgcatgcaagggcccaatcatgacaaacagaatacagcccccaccacactaacacatctgttcactcactaagggctggcgggttaagggcaacacaaaaggcacagctggaaaaccatcacctatgctccctacaggaccagccgcactagctaaccaggcaggagccctcattgctgggcttgacttctccctcgagcagggagttcatcacaaccttcgtcaagtagctgcaggttcctttttttcccagggggg

SEQ ID NO: 3018 - DNA, 690 bp, Mus musculus
gatttaagcgtttcttgcgagatgggtacagaacgccattggaagatcccaacagacgctattacaaaccagcagagattaagctgtttgatggcattgaatgtgaatttcccatattcttcctttacatgatgatcgatggtgtttttagaggcaatcttgaacaagtcaaggaatatcaggaccttttgacacctttgcttcatcagaccacagaaggatatcctgttgtgccaaagtactattatgtgccagctgactttgtagaatgtgaaaaaagaaaccctggtagtcagaagcggtttccaagtaactgtggccgtgatgggaagttgtttctttggggacaagctctttatatcattgcaaaactcctagctgatgagttaatcagccctaaagacattgaccctgtccagcgctttgtcccacttcagaatcaacgtaacgtgagcatgagatactccaatcagggcccactggaaaatgacttggtggttcatgtagcacttgtagcagaaagccaacgccttcaagtttttctcaatacatatggtattcaaacccaaactcctcagcaggtggaacccattcagatctggcctcagcaggagcttgtaaaagcttatttccacctgggaatcaatgaaaagttgggtctgtctggaaggccagataggcccattggct

SEQ ID NO: 3019 - DNA, 422 bp, Mus musculus
cacaggggccagctggcatttattagggtagttacacttcatcactggggggcgagtaaagggacctaagactctttgttatcacaaagaaataaataaagcttatttttaggaaaactcttgagtagctgaaatctagccgtagcactagagagacccagcctgtgtgaccgatgaagctggagtggaagggaggaaggacagccacctaggagagtcactcaccgcccctcctccagctcctggccacagctgatcctggttgcaggcatggagtacagggaaacctagaaggggaggggctgggctagaacactgagaagccatgatctaccagggtgtgagctgaccatggtcacatgatctttccccctcactccagagaggtctagacggcggcttctccagaccgtttccttgaa

SEQ ID NO: 3020 - DNA, 609 bp, Mus musculus
ccaaggctatgggtgagaagagatttgatgaagccattaagctgagaggccggagcttcatgaacaactgggaggtatacaagcttctagctcatgtcagacccccagtctctaagggtgggttgcacacagtggccgtgatgaatgtgggggccccagctgctggcatgaatgccgctgttcgctctaccgtgaggattggccttatccagggcaaccgggtgctggtcgtacatgatggctttgagggtctggccaaaggtcagattgaggaggctggctggagctatgttggaggctggactggtcaaggtggttccaaacttggtactaaaaggactctccccaagaagaacctggaacagatcagtgccaacataaccaagtttaacatccagggccttgtcatcattgggggctttgaggcttacacagggggcttggagctgatggaaggcaggaagcagtttgatgagctctgcatcccgtttgtggtcattccggccacggtttccaataacgtccctgggtcagacttcagcatcggggctgacacagcactgaacaccatctgcacgacttgtgaccgaatcaagcagtctgcagcag

SEQ ID NO: 3021 - DNA, 550 bp, Mus musculus
gagattcacactttattgagaaccaaatggggcttagctgcttactctgaggaccaaggcagcacacagacagatctaatctctcaggccaggccggggattctcgggtctagtacattcctccaaccatcactgagggaagggctggatacagggcagagacaagggataggaggagactaatgaagaaatggagagcccgaggacccagaggcttggctgagggaagggctgggaagaggaaatggaggaatagggaatggaaaggagaagaaagctgcacgtggtaagagctagggccagcagagcactcatgagtattcccccaggtctgggctttgtaatcctactttgggttccaaaaggccatctttgcaaagattggcttggagaggaagcggctgctcttcatgtagtcagatatcttcttcaggccctcaaagcgacccatgaagtccttcaggtttgggaaggcatccaggcacttgggctcaaatattcggtgttgatcaaggacatcataaacaagaaaatccacataggtgacctt

SEQ ID NO: 3022 - DNA, 609 bp, Mus musculus
accagcactatgcctatgacactaggttactgggacatccgtgggctggctcacgccatccgcctgctcctggaatacacagacacaagctatgaggacaagaaatacaccatgggggacgctcctgactatgaccgaagccagtggctgagtgagaagttcaagctgggcctggactttcccaatctgccccacttgattgatggatcacacaagatcacccagagcaatgccatcctgcgctaccttgcccgaaagcacaacctgtgtggagagacagaggaggagaggattcgtgtggacattttggagaaccaggctatggacacccgcatacagttggccatggtttgctacagccctgactttgagaaaaagaagccagagtacttagagggtctccctgagaagatgaagctctactctgagtttctgggcaagcagccatggtttgcagggaacaaggtcacctatgtggattttcttgtttatgatgtccttgatcaacaccgaatatttgagcccaagtgcctggatgccttcccaaacctgaaggacttcatgggtcgctttgagggcctgaagaagatatctgactacatgaagagc

SEQ ID NO: 3023 - DNA, 3900 bp, Mus musculus
ggtcccttcgcgtcgtgcagggacggattcggggtggcggtgcctggccgggcgtaggcaagagcaaacgagcggctccttgcaggctgtgtgcgcccggctttcagcatgggggatcaggctttgagctttcttaaggacttcctggcaggtggcatcgccgccgccgtctccaagacggcggtcgccccgatcgagagggtcaaactgctgctgcaggtcaggacggctgggggcgcgagcggggcgcggcagggcgctggggggatgcggggcggggcgcgcgcgtcagggcgcagggatgcgggcggggcgcggggatgctgcggcgcgggcgcgcgcgacgctgcggaaaaatctgtgctaggccgcaagcccggggcctaggcgaaggggaaggtgccctctacgcagatacaggtccagcgtcagtggcagattcctggtgtcgggtggcgcccgcgttggggtgtctatatatggaaacccaccccgaagctggtctacctcgagccagatcctgtgcccggtacagcaagcgacattccatctaaggcctcttaggcgggcctcaccctttggccacatcctctgcaccttcttatctgcatccacccttgacaattgaagcatcagattaatcattgactggggttcgctctatgtcgcgtgcgctgcgctataacttgacattgatttcattcatctttcctataacctctgcaagataggaatcgtccttggcccgtattcacagatggagacactgaggcagaaatccagaagtaatattcaggataaattcagaccgccttggccatcttgtccccatataattttctccccggtcattgaaggggcctgccatcatcatctgatccatctcaaaggcaaacgctgttcaatggggaagagccgtttgggcatttaaacataacacaaaatgctccaacagattggccacggcagtagtaactcactaatcacttgaattatctgcttgaaaaatttcagacacctactgttaagacaaccttgtctcgggggacattcgagtaaagcagggacattgtcatctgctcaccatgttaagagcccttgagggagggatctttattgccattccccataagcctgcagggaatttcgctcaaatgtccttataatgtcgagaaattggactgctttttagcttagtcaagtaactaacatttattggtatgttcttggtaactgatttcctgatacattaaaaaacaattggaattctcccttgtcacttgaaagtgaaagatgggcgaggaaccctgggcatagcagtgcacatttataatcccagcatttgggaggcaacacaggatgattttttagttccaggctagcctgggctatataggatgaccctatcctttcaaaacaaaaataagaaaaactgaggaaatacaaatcctttttccccctctgtcttcccttctctctgcctgtcctctgccaccccttcctccctcccaccccaaactaggtccagcatgccagcaaacagatcagtgcagagaagcagtacaaaggcatcattgattgtgtcgtgagaatccccaaggagcagggctttctctctttctggaggggtaacctggccaacgtgatccggtacttccccactcaagccctgaacttcgccttcaaagacaagtacaagcagatcttcctgggaggcgtggatcgccataagcagttctggcgctactttgctggtaacctggcctctggtggggcagctggggccacctccctctgcttcgtctacccgctggactttgctaggaccaggctggctgccgacgtgggcaagggatcttcccagcgagaattcaatgggctgggcgactgtctcaccaagatcttcaagtcggacggcctgaagggtctctaccagggtttcagtgtctctgtccagggcatcatcatctacagagctgcctacttcggagtctatgacactgccaagggtgagaggggggctttggggtggaaggtgtggggagggggttatggagagaggattctgtgtgatctacccttccatgatgacctttgtgtgttagttgcctttcctacctctgagctaacctgagttctgaggaggtaatgtgatgtggtttggataagttagtaggtaaaggagcctctgtctcccgtactggtaaatactgtggctttgagctactcaggaggcaaagcctccctctaacccaacacagctgctagtctctcagctgaactagaagcaagctctgtgtcaatagagctgtagcttctttggattaagggaaagcggcagccaactttgcctggttgcatgtaagggggcctcgggggaggagctggttcttgtggaagggcagggtatggcgttgggtccgtagccttgtcttccgttgacctgcttttgaagcacctgatagccatttgcttcttggctctgctcacagggatgctgccagaccccaagaatgtgcacattatcgtgagctggatgattgcccagagtgtgacagcggtggcggggctggtgtcctatccgtttgacactgttcgtcgtaggatgatgatgcagtctggccggaaagggggtaagcatgaactcccccaagtgtgaatcttaggtgttacccctggagaacatacactcacaagtgctacgaggccttgtttttctaagttgaagggcaaaatgtcttcatcaggccttcagaaaccaagattctaatttctcctttagcttttccttaagggaattttgttctttttattaaagaaataagaacgtaacaaaatgaggtttttagagttggccctaggtatttagcattaacagcctgggtgcataagcaagggcaaagaagtaattagctgtacacttaaaacccctgcttccgattatagttattgggagtataaatgagatgggatgttttagctaaatgagaaatggcttgaccatcctgctttgggagttttagcttcataggtaaaagcatgaagcggccattcttaaagtaaaaaaaaacaaaaaacaaaacccacatatacactcacacacataccaaatgtgaggggattttgtacaccccaacagtcataccttttatcctccacaatcttgggcagtgtaatctgaggccagggctcgttcgctcatccataagaagttatccagagagtgtgacagacactccttcctcagcccgccttccagttttagccccatagtctgtaaactgtctgattgctccagtttttacataactgatctttttcataaccgagttctcgagttaaggttgctagaagacagggtaactgttactcgggaggaaaggagcccttacccacgtttgtctccacagctgatattatgtacacggggacacttgactgctggaggaagattgcaaaagatgaaggagccaacgctttcttcaaaggtgcttggtccaatgtactgagaggcatgggtggtgcttttgtattggtattgtatgatgagatcaaaaaatatgtgtaatacccaagctcacaagttcacagatccattgtgtggtttaacagactattcttgaggaaataaaacaaaaaaaagagacagatcttggataaaaccagaccgtaaggaatacctcagaaaaaaatgcttcattgagtattcattaaaccacagaagtattttgtatttattttacatttagattcccacagaaaacaggctagcttatcatacttgttcacctgattaactgaagaactgatgctgaaaagtaactcagtgtgactcattaataaagactactcaatacactttatctccctgcccttattaactactaacagactgaaaag

SEQ ID NO: 3024 - DNA, 1096 bp, Mus musculus
cggccgcggagctggagtagcatgtgggcgttcggaggtcgcgcagccgtgggcttgctgccccggacggcgtcccgggcctccgcctgggtcgggaacccgcgctggagggaaccgatcgtaacctgcggccgccgaggcctacatgtcacagtcaacgccggcgccacccgccacgcccatttgaacctccactacctccagattctgaacatcaaaaagcagagcgtctgcgtggtgcatttgaggaacttggggacattggacaacccaagctctctagacgagacagcgtatgaaagactggcggaagagaccctggactccctggccgagttctttgaagacctcgcagacaagccctataccctggaggactacgatgtctcttttggggatggcgtgctcaccattaagctgggcggggatctagggacctacgtgatcaacaagcagaccccaaacaagcaaatctggctgtcttctccttccagcggccccaagcgctatgactggaccgggaagaactgggtgtactctcatgacggcgtgtctctgcatgagctgctggccagggagctgactaaagctttaaacaccaaactggacttgtcttcattggcctattctggaaaaggcacttgactgccagccagattccaagacattaaacactgtcaggtgaagacccccagcctcctcctgtagctgaatgtctgccttcccatacctgctcctgaagatagtcacaccgtgtgtgacagctctgtgaaaaaagtgtgttccctcccaccctgtccccggacctggctcttcatttctacagacatttgttaggattatgtcatttgctccccaacctgagacctctggtctcttagaaagtcttatatgctgggcagtggtggcgcacgcctttaatcccagcactcgggaggcagaggcaggcggatttctgagttggaggccagcctggtttacagagtgagttccaggacagccaggactacacagagaaaccctgtgtcgaaaaaaaaaaaaaaaaaaagaaagaaagaaagtcttacaccacaagtgtgtccatgatataacagcc

SEQ ID NO: 3025 - DNA, 897 bp, Mus musculus
gcgagcgaacggccgtgttctgaggagagcagcggtcgtgtaaacctcaataatgttgtgtcgggcggcgtgcagcacgggcaggaggctgggccctgtggccgtggccgcgggctcccggcacaagcacagcctcccagacctgccttacgactatggcgcgctggagccacacattaacgcgcagatcatgcagctgcaccacagcaagcaccatgcggcctacgtgaacaacctcaacgccaccgaggagaagtaccacgaggctctggccaagggagatgttacaactcaggtcgctcttcagcctgcactgaagttcaatggtgggggacatattaatcacaccattttctggacaaacctgagccctaagggtggtggagaacctaaaggagagttgctggaggctatcaagcgtgactttgggtcttttgagaagtttaaggagaagctgacagccatgtctgtgggagtccaaggttcaggctggggctggcttggcttcaataaggagcaaggtcgcttacagattgctgcctgctctaatcaggacccattgcaaggaacaacaggccttattccgctgctggggattgacgtgtgggagcacgcttactaccttcagtataaaaacgtcagacctgactatctgaaagctatttggaatgtaatcaactgggagaatgttactgaaagatacacagcttgcaagaagtgaaacctcactcacggccacattgagtggccaggctccgggctggtttatagtagtgtagagcattgcagcactatgactggggtgctgtagtctttattgatgtctttccacatacctgataattctatgataatttcttattttaacttaaatctattcttaggccaactactttg

SEQ ID NO: 3026 - DNA, 955 bp, Mus musculus
aaaggtttggtcctggccttataattaattagaggtaaaattacacatgcaaacctccatagaccggtgtaaaatcccttaaacatttacttaaaatttaaggagagggtatcaagcacattaaaatagcttaagacaccttgcctagccacacccccacgggactcagcagtgataaatattaagcaataaacgaaagtttgactaagttatacctcttagggttggtaaatttcgtgccagccaccgcggtcatacgattaacccaaactaattatcttcggcgtaaaacgtgtcaactataaataaataaatagaattaaaatccaacttatatgtgaaaattcattgttaggacctaaactcaataacgaaagtaattctagtcatttataatacacgacagctaagacccaaactgggattagataccccactatgcttagccataaacctaaataattaaatttaacaaaactatttgccagagaactactagccatagcttaaaactcaaaggacttggcggtactttatatccatctagaggagcctgttctataatcgataaaccccgctctacctcaccatctcttgctaattcagcctatataccgccatcttcagcaaaccctaaaaaggtattaaagtaagcaaaagaatcaaacataaaaacgttaggtcaaggtgtagccaatgaaatgggaagaaatgggctacattttcttataaaagaacattactataccctttatgaaactaaaggactaaggaggatttagtagtaaattaagaatagagagcttaattgaattgagcaatgaagtacgcacacaccgcccgtcaccctcctcaaattaaattaaacttaacataattaatttctagacatccgtttatgagaggagataagtcgtaacaaggtaagcatactggaaagtgtgcttggaataat

SEQ ID NO: 3027 - DNA, 1582 bp, Mus musculus
actaatcctagccctagccctacacaaatataattatactattatataaatcaaaacatttatcctactaaaagtattggagaaagaaattcgtacatctaggagctatagaactagtaccgcaagggaaagatgaaagactaattaaaagtaagaacaagcaaagattaaaccttgtaccttttgcataatgaactaactagaaaacttctaactaaaagaattacagctagaaaccccgaaaccaaacgagctacctaaaaacaattttatgaatcaactcgtctatgtggcaaaatagtgagaagatttttaggtagaggtgaaaagcctaacgagcttggtgatagctggttacccaaaaaatgaatttaagttcaattttaaacttgctaaaaaaacaacaaaatcaaaaagtaagtttagattatagccaaaagagggacagctcttctggaacggaaaaaacctttaatagtgaataattaacaaaacagcttttaaccattgtaggcctaaaagcagccaccaataaagaaagcgttcaagctcaacataaaatttcaattaattccataatttacaccaacttcctaaacttaaaattgggttaatctataactttatagatgcaacactgttagtatgagtaacaagaattccaattctccagacatacgcgtataacaactcggataaccattgttagttaatcagactataggcaataatcacactataaataatccacctataacttctctgttaacccaacaccggaatgcctaaaggaaagatccaaaaagataaaaggaactcggcaaacaagaaccccgcctgtttaccaaaaacatcacctctagcattacaagtattagaggcactgcctgcccagtgactaaagtttaacggccgcggtatcctgaccgtgcaaaggtagcataatcacttgttccttaattagggactagcatgaacggctaaacgagggtccaactgtctcttatctttaatcagtgaaattgacctttcagtgaagaggctgaaatataataataagacgagaagaccctatggagcttaaattatataacttatctatttaatttattaaacctaatggcccaaaaactatagtataagtttgaaatttcggttggggtgacctcggagaataaaaaatcctccgaatgattataacctagacttacaagtcaaagtaaaatcaacatatcttattgacccagatatattttgatcaacggaccaagttaccctagggataacagcgcaatcctatttaagagttcatatcgacaattagggtttacgacctcgatgttggatcaggacatcccaatggtgtagaagctattaatggttcgtttgttcaacgattaaagtcctacgtgatctgagttcagaccggagcaatccaggtcggtttctatctatttacgatttctcccagtacgaaaggacaagagaaatagagccaccttacaaataagcgctctcaacttaatttatgaataaaatctaaataaaatatatacgtacaccctctaacctagagaaggtt

SEQ ID NO: 3028 - DNA, 681 bp, Mus musculus
atgaacgaaaatctatttgcctcattcattaccccaacaataataggattcccaatcgttgtagccatcattatatttccttcaatcctattcccatcctcaaaacgcctaatcaacaaccgtctccattctttccaacactgactagttaaacttattatcaaacaaataatgctaatccacacaccaaaaggacgaacatgaaccctaataattgtttccctaatcatatttattggatcaacaaatctcctaggccttttaccacatacatttacacctactacccaactatccataaatctaagtatagccattccactatgagctggagccgtaattacaggcttccgacacaaactaaaaagctcacttgcccacttccttccacaaggaactccaatttcactaattccaatacttattattattgaaacaattagcctatttattcaaccaatggcattagcagtccggcttacagctaacattactgcaggacacttattaatacacctaatcggaggagctactctagtattaataaatattagcccaccaacagctaccattacatttattattttacttctactcacaattctagaatttgcagtagcattaattcaagcctacgtattcaccctcctagtaagcctatatctacatgataatacataa

SEQ ID NO: 3029 - DNA, 204 bp, Mus musculus
atgccacaactagatacatcaacatgatttatcacaattatctcatcaataattaccctatttatcttatttcaactaaaagtctcatcacaaacattcccactggcaccttcaccaaaatcactaacaaccataaaagtaaaaaccccttgagaattaaaatgaacgaaaatctatttgcctcattcattaccccaacaataa

SEQ ID NO: 3030 - DNA, 1545 bp, Mus musculus
atgttcattaatcgttgattattctcaaccaatcacaaagatatcggaaccctctatctactattcggagcctgagcgggaatagtgggtactgcactaagtattttaattcgagcagaattaggtcaaccaggtgcacttttaggagatgaccaaatttacaatgttatcgtaactgcccatgcttttgttataattttcttcatagtaataccaataataattggaggctttggaaactgacttgtcccactaataatcggagccccagatatagcattcccacgaataaataatataagtttttgactcctaccaccatcatttctccttctcctagcatcatcaatagtagaagcaggagcaggaacaggatgaacagtctacccacctctagccggaaatccagtccatgcaggagcatcagtagacctaacaattttctcccttcatttagctggagtgtcatctattttaggtgcaattaattttattaccactattatcaacatgaaacccccagccataacacagtatcaaactccactatttgtctgatccgtacttattacagccgtactgctcctattatcactaccagtgctagccgcaggcattactatactactaacagaccgcaacctaaacacaactttctttgatcccgctggaggaggggacccaattctctaccagcatctgttctgattctttgggcacccagaagtttatattcttatcctcccaggatttggaattatttcacatgtagttacttactactccggaaaaaaagaacctttcggctatataggaatagtatgagcaataatgtctattggctttctaggctttattgtatgagcccaccacatattcacagtaggattagatgtagacacacgagcttgctttacatcagccactataattatcgcaattcctaccggtgtcaaagtatttagctgacttgcaaccctacacggaggtaatattaaatgatctccagctatactatgagccttaggctttattttcttatttacagttggtggtctaaccggaattgttttatccaactcatcccttgacatcgtgcttcacgatacatactatgtagtagcccatttccactatgttctatcaatgggagcagtgtttgctatcatagcaggatttgttcactgattcccattattttcaggcttcaccctagatgacacatgagcaaaagcccacttcgccatcatattcgtaggagtaaacataacattcttccctcaacatttcctgggcctttcaggaataccacgacgctactcagactacccagatgcttacaccacatgaaacactgtctcttctataggatcatttatttcactaacagctgttctcatcatgatctttataatttgagaggcctttgcttcaaaacgagaagtaatatcagtatcgtatgcttcaacaaatttagaatgacttcatggctgccctccaccatatcacacattcgaggaaccaacctatgtaaaagtaaaataa

SEQ ID NO: 3031 - DNA, 684 bp, Mus musculus
atggcctacccattccaacttggtctacaagacgccacatcccctattatagaagagctaataaatttccatgatcacacactaataattgttttcctaattagctccttagtcctctatatcatctcgctaatattaacaacaaaactaacacatacaagcacaatagatgcacaagaagttgaaaccatttgaactattctaccagctgtaatccttatcataattgctctcccctctctacgcattctatatataatagacgaaatcaacaaccccgtattaaccgttaaaaccatagggcaccaatgatactgaagctacgaatatactgactatgaagacctatgctttgattcatatataatcccaacaaacgacctaaaacctggtgaactacgactgctagaagttgataaccgagtcgttctgccaatagaacttccaatccgtatattaatttcatctgaagacgtcctccactcatgagcagtcccctccctaggacttaaaactgatgccatcccaggccgactaaatcaagcaacagtaacatcaaaccgaccagggttattctatggccaatgctctgaaatttgtggatctaaccatagctttatgcccattgtcctagaaatggttccactaaaatatttcgaaaactgatctgcttcaataatttaa

SEQ ID NO: 3032 - DNA, 784 bp, Mus musculus
atgacccaccaaactcatgcatatcacatagttaatccaagtccatgaccattaactggagccttttcagccctccttctaacatcaggtctagtaatatgatttcactataattcaattacactattaacccttggcctactcaccaatatcctcacaatatatcaatgatgacgagacgtaattcgtgaaggaacctaccaaggccaccacactcctattgtacaaaaaggactacgatatggtataattctattcatcgtctcggaagtatttttctttgcaggattcttctgagcgttctatcattctagcctcgtaccaacacatgatctaggaggctgctgacctccaacaggaatttcaccacttaaccctctagaagtcccactacttaatacttcagtacttctagcatcaggtgtttcaattacatgagctcatcatagccttatagaaggtaaacgaaaccacataaatcaagccctactaattaccattatactaggactttacttcaccatcctccaagcttcagaatactttgaaacatcattctccatttcagatggtatctatggttctacattcttcatggctactggattccatggactccatgtaattattggatcaacattccttattgtttgcctactacgacaactaaaatttcacttcacatcaaaacatcacttcggatttgaagccgcagcatgatactgacattttgtagacgtaatctgacttttcctatacgtctccatttattgatgaggatctt

SEQ ID NO: 3033 - DNA, 1144 bp, Mus musculus
atgacaaacatacgaaaaacacacccattatttaaaattattaaccactcattcattgacctacctgccccatccaacatttcatcatgatgaaactttgggtcccttctaggagtctgcctaatagtccaaatcattacaggtcttttcttagccatacactacacatcagatacaataacagccttttcatcagtaacacacatttgtcgagacgtaaattacgggtgactaatccgatatatacacgcaaacggagcctcaatattttttatttgcttattccttcatgtcggacgaggcttatattatggatcatatacatttatagaaacctgaaacattggagtacttctactgttcgcagtcatagccacagcatttataggctacgtccttccatgaggacaaatatcattctgaggtgccacagttattacaaacctcctatcagccatcccatatattggaacaaccctagtcgaatgaatttgagggggcttctcagtagacaaagccaccttgacccgattcttcgctttccacttcatcttaccatttattatcgcggccctagcaatcgttcacctcctcttcctccacgaaacaggatcaaacaacccaacaggattaaactcagatgcagataaaattccatttcacccctactatacaatcaaagatatcctaggtatcctaatcatattcttaattctcataaccctagtattatttttcccagacatactaggagacccagacaactacataccagctaatccactaaacaccccaccccatattaaacccgaatgatatttcctatttgcatacgccattctacgctcaatccccaataaactaggaggtgtcctagccttaatcttatctatcctaattttagccctaatacctttccttcatacctcaaagcaacgaagcctaatattccgcccaatcacacaaattttgtactgaatcctagtagccaacctacttatcttaacctgaattgggggccaaccagtagaacacccatttattatcattggccaactagcctccatctcatacttctcaatcatcttaattcttataccaatctcaggaattatcgaagacaaaatactaaaattatatccat

SEQ ID NO: 3034 - DNA, 948 bp, Mus musculus
attaatatcctaacactcctcgtccccattctaatcgccatagccttcctaacattagtagaacgcaaaatcttagggtacatacaactacgaaaaggccctaacattgttggtccatacggcattttacaaccatttgcagacgccataaaattatttataaaagaaccaatacgccctttaacaacctctatatccttatttattattgcacctaccctatcactcacactagcattaagtctatgagttcccctaccaataccacacccattaattaatttaaacctagggattttatttattttagcaacatctagcctatcagtttactccattctatgatcaggatgagcctcaaactccaaatactcactattcggagctttacgagccgtagcccaaacaatttcatatgaagtaaccatagctattatccttttatcagttctattaataaatggatcctactctctacaaacacttattacaacccaagaacacatatgattacttctgccagcctgacccatagccataatatgatttatctcaaccctagcagaaacaaaccgggcccccttcgacctgacagaaggagaatcagaattagtatcagggtttaacgtagaatacgcagccggcccattcgcgttattctttatagcagagtacactaacattattctaataaacgccctaacaactattatcttcctaggacccctatactatatcaatttaccagaactctactcaactaacttcataatagaagctctactactatcatcaacattcctatggatccgagcatcttatccacgcttccgttacgatcaacttatacatcttctatgaaaaaactttctacccctaacactagcattatgtatgtgacatatttctttaccaatttttacagcgggagtaccaccatacatatag

SEQ ID NO: 3035 - DNA, 1038 bp, Mus musculus
ataaatcctatcacccttgccatcatctacttcacaatcttcttaggtcctgtaatcacaatatccagcaccaacctaatactaatatgagtaggcctagaattcagcctactagcaattatccccatactaatcaacaaaaaaaacccacgatcaactgaagcagcaacaaaatacttcgtcacacaagcaacagcctcaataattatcctcctggccatcgtactcaactataaacaactaggaacatgaatatttcaacaacaaacaaacggtcttatccttaacataacattaatagccctatccataaaactaggcctcgccccattccacttctgattaccagaagtaactcaagggatcccactgcacataggacttattcttcttacatgacaaaaaattgctcccctatcaattttaattcaaatttacccgctactcaactctactatcattttaatactagcaattacttctattttcataggggcatgaggaggacttaaccaaacacaaatacgaaaaattatagcctattcatcaattgcccacataggatgaatattagcaattcttccttacaacccatccctcactctactcaacctcataatctatattattcttacagcccctatattcatagcacttatactaaataactctataaccatcaactcaatctcacttctatgaaataaaactccagcaatactaactataatctcactgatattactatccctaggaggccttccaccactaacaggattcttaccaaaatgaattatcatcacagaacttataaaaaacaactgtctaattatagcaacactcatagcaataatagctctactaaacctattcttttatattcgcctaatttattccacttcactaacaatatttccaaccaacaataactcaaaaataataactcaccaaacaaaaactaaacccaacctaatattttccaccctagctatcataagcacaataaccctacccctagccccccaactaattacctag

SEQ ID NO: 3036 - DNA, 345 bp, Mus musculus
atcaacctgtacactgttatcttcattaatattttattatccctaacgctaattctagttgcattctgactcccccaaataaatctgtactcagaagcaaatccatatgaatgcggattcgaccctacaagctctgcacgtctaccattctcaataaaatttttcttggtagcaattacatttctattatttgacctagaaattgctcttctacttccactaccatgagcaattcaaacaattaaaacctctactataataattatagcctttattctagtcacaattctatctctaggcctagcatatgaatgaacacaaaaaggattagaatgaacagagtaa

SEQ ID NO: 3037 - DNA, 1378 bp, Mus musculus
atgctaaaaattattcttccctcactaatgctactaccactaacctgactatcaagccctaaaaaaacctgaacaaacgtaacctcatatagttttctaattagtttaaccagcctaacacttctatgacaaaccgacgaaaattataaaaacttttcaaatatattctcctcagaccccctatccacaccattaattattttaacagcctgattactgccactaatattaatagctagccaaaaccacctaaaaaaagataataacgtactacaaaaactctacatctcaatactaatcagcttacaaattctcctaatcataaccttttcagcaactgaactaattatattttatattttatttgaagcaaccttaatcccaacacttattattattacccgatgagggaaccaaactgaacgcctaaacgcagggatttatttcctattttataccctaatcggttctattccactgctaattgccctcatcttaatccaaaaccatgtaggaaccctaaacctcataattttatcattcacaacacacaccttagacgcttcatgatctaacaacttactatggttggcatgcataatagcatttcttattaaaataccattatatggagttcacctatgactaccaaaagcccatgttgaagctccaattgctgggtcaataattctagcagctattcttctaaaattaggtagttacggaataattcgcatctccattattctagacccactaacaaaatatatagcataccccttcatccttctctccctatgaggaataattataactagctcaatctgcttacgccaaacagatttaaaatcactaatcgcctactcctcagttagccacatagcacttgttattgcatcaatcataatccaaactccatgaagcttcataggagcaacaatactaataatcgcacatggcctcacatcatcactcctattctgcctagcaaactccaactacgaacggatccacagccgtactataatcatggcccgaggacttcaaatggtcttcccacttatagccacatgatgactgatagcaagtctagctaatctagctctacccccttcaatcaatctaataggagaattattcattaccatatcattattttcttgatcaaactttaccattattcttataggaattaacattattattacaggtatatactcaatatacataattattaccacccaacgcggcaaactaaccaaccatataattaacctccaaccctcacacacacgagaactaacactaatagcccttcacataattccacttattcttctaactaccagtccaaaactaattacaggcctgacaatat

SEQ ID NO: 3038 - DNA, 294 bp, Mus musculus
atgccatctaccttcttcaacctcaccatagccttctcactatcacttctagggacacttatatttcgctctcacctaatatccacattactatgcctggaaggcatagtattatccttatttattataacttcagtaacttccctaaactccaactccataagctccataccaatccccatcaccttagttttcgcagcctgcgaagcagctgtaggactagccctactagtaaaagtttcaaacacgtacggaacagattacgtccaaaatctcaacctactacaatgctaa

SEQ ID NO: 3039 - DNA, 1824 bp, Mus musculus
atcaatattttcacaacctcaatcttattaatcttcattcttctactatccccaatcctaatttcaatatcaaacctaattaaacacatcaacttcccactgtacaccaccacatcaatcaaattctccttcattattagcctcttacccctattaatatttttccacaataatatagaatatataattacaacctggcactgagtcaccataaattcaatagaacttaaaataagcttcaaaactgactttttctctatcctgtttacatctgtagccctttttgtcacatgatcaattatacaactctcttcatgatatatacactcagacccaaacatcaatcgattcattaaatatcttacactattcctgattaccatgcttatcctcacctcagccaacaacatatttcaacttttcattggctgagaaggggtgggaattatatctttcctactaattggatgatggtacggacgaacagacgcaaatactgcagccctacaagcaatcctctataaccgcatcggagacatcggattcattttagctatagtttgattttccctaaacataaactcatgagaacttcaacagattatattctccaacaacaacgacaatctaattccacttataggcctattaatcgcagctacaggaaaatcagcacaatttggcctccacccatgactaccatcagcaatagaaggccctacaccagtttcagcactactacactcaagtacaatagtagttgcaggaattttcctactggtccgattccaccccctcacgactaataataactttattttaacaactatactttgcctcggagccctaaccacattatttacagctatttgtgctctcacccaaaacgacatcaaaaaaatcattgccttctctacatcaagccaactaggcctgataatagtgacgctaggaataaaccaaccacacctagcattcctacacatctgtacccacgcattcttcaaagctatactctttatatgctctggctcaatcattcatagcctggcagacgaacaagacatccgaaaaataggaaacatcacaaaaatcataccattcacatcatcatgcctagtaatcggaagcctcgccctcacaggaataccattcctaacagggttctactcaaaagacctaattattgaagcaattaatacctgcaacaccaacgcctgagccctactaattacactaatcgccacttctataacagctatgtacagcatacgaatcatttacttcgtaacaataacaaaaccgcgttttccccccctaatctccattaacgaaaatgacccagacctcataaacccaatcaaacgcctagcattcggaagcatctttgcaggatttgtcatctcatataatattccaccaaccagcattccagtcctcacaataccatgatttttaaaaaccacagccctaattatttcagtattaggattcctaatcgcactagaactaaacaacctaaccataaaactatcaataaataaagcaaatccatattcatccttctcaactttactggggtttttcccatctattattcaccgcattacacccataaaatctctcaacctaagcctaaaaacatccctaactctcctagacttgatctggttagaaaaaaccatcccaaaatccacctcaactcttcacacaaacataaccactttaacaaccaaccaaaaaggcttaattaaattgtactttatatcattcctaattaacatcatcttaattattatcttatactcaattaatctcgagtaa

SEQ ID NO: 3040 - DNA, 519 bp, Mus musculus
ttaatctcgagtaatctcgataataataaaaatacccgcaaacaaagatcacccagctactaccatcattcaagtagcacaactatatattgccgctaccccaatccctccttccaacataactccaacatcatcaacctcatacatcaaccaatctcccaaaccatcaagattaattactccaacttcatcataataattaagcacacaaattaaaaaaacctctataatcacccccaatactaaaaaacccaaaattaatcagttagatccccaagtctctggatattcctcagtagctatagcagtcgtatatccaaacacaaccaacatcccccctaaataaattaaaaaaactattaaacctaaaaacgatccaccaaaccctaaaaccattaaacaaccaacaaacccactaacaattaaacctaaacctccataaataggtgaaggctttaatgctaacccaagacaaccaaccaaaaataatgaacttaaaacaaaaatataattattcat
